(19) United States
(12) Patent Application Publication
(10) Pub. No.: US 2026/0193357 A1
(43) Pub. Date: Jul. 9, 2026

(54) MODULAR TETRAVALENT BISPECIFIC ANTIBODY PLATFORM

(71) Applicant: Dana-Farber Cancer Institute, Inc., Boston, MA (US)

(72) Inventor: Wayne A. Marasco, Boston, MA (US)

(21) Appl. No.: 19/318,009

(22) Filed: Sep. 3, 2025

Related U.S. Application Data
(63) Continuation of application No. 16/340,878, filed on Oct. 16, 2017, now abandoned.
(60) Provisional application No. 62/408,271, filed on Oct. 14, 2016.

(51) Int. Cl. C07K 16/28; C07K 16/46

(52) U.S. Cl. CPC C07K 16/2827; C07K 16/2878; C07K 16/468; C07K 2317/31; C07K 2317/524; C07K 2317/53; C07K 2317/622; C07K 2317/64; C07K 2317/732; C07K 2317/734; C07K 2319/00

(57) ABSTRACT

The present invention relates to a tetrameric bispecific antibody molecule, as well as a method for producing the same, its use and a nucleic acid molecule encoding the tetrameric bispecific antibody molecule.

### RELATED APPLICATIONS

[0001] This application is a continuation of U.S. Ser. No. 16/340,878 filed on Apr. 10, 2019 which is a US National Phase of PCT Application No. PCT/US 2017/056814 filed on Oct. 16, 2017 which claims benefit of, and priority to, U.S. Ser. No. 62/408,271 filed on Oct. 14, 2016 the contents of which is hereby incorporated by reference its entirety.

### GOVERNMENT INTEREST

[0002] This invention was made with government support under [ ] awarded by the [ ]. The government has certain rights in the invention.

### FIELD OF THE INVENTION

[0003] The present invention relates generally to tetrameric bispecific antibody molecules, methods and systems of producing same.

### REFERENCE TO A SEQUENCE LISTING XML

[0004] This application contains a Sequence Listing which has been submitted electronically in XML format. The Sequence Listing XML is incorporated herein by reference. Said XML file, created on Mar. 5, 2026, is named 5031461-000038-US3_SL.xml and is 1,793,704 bytes in size.

### BACKGROUND OF THE INVENTION

[0005] Bispecific antibodies (BsAb) are antibodies or antibody-like molecules having two different binding specificities. BsAbs have broad applications in biomedicine, especially in immunotherapy for tumors. Presently, a focus of immunotherapy research is on how to utilize cell-mediated cytotoxicity of BsAb to kill tumor cells. A BsAb can be designed to target a tumor cell and an effector cell simultaneously, while triggering the effector cell's destruction of the tumor cell.

[0006] BsAb can be prepared by methods such as chemical engineering, cell engineering and genetic engineering. An advantage of genetic engineering is that the antibodies can be easily modified, which renders design and production of many different forms of bispecific antibody fragments, including diabodies, tandem ScFv, and single-chain diabodies, as well as derivatives thereof. Since those BsAbs do not have an IgG Fc domain, their small size enhances their penetration into tumors, but they have significantly shorter half-life in vivo and also lack the ADCC effect that is associated with the constant region of the antibody.

[0007] To improve the stability and therapeutic potential, recombinant genetic modifications were made in the heavy chains to facilitate their heterodimerization and to produce greater yields of Fc-containing IgG-like bispecific antibodies. Several rational design strategies have been used to engineer antibody CH3 chains for heterodimerization, namely disulfide bonds, salt bridges, knobs-into-holes. The bases for creating knob and hole in the juxtaposed positions is that the knob and hole interaction will favor heterodimer formation, whereas the knob-knob and the hole-hole interaction will prevent homodimers formation due to the deletion of favorable interactions. While this knob-into-holes approach solves the heavy chain homodimerization problem, it did not address the issues regarding mispairing between the light chain and heavy chains from two different antibodies. Although it is possible to identify identical light chains for two different antibodies, the possibility of BsAb construction using two antibody sequences that can share the common light chain is very limited.

[0008] There is a need to provide better BsAbs that are easier to prepare, have better clinical stability and efficacy and/or reduced systematic toxicity.

### SUMMARY OF THE INVENTION

[0009] The present invention provides tBsAbs that are easier to prepare, have better clinical stability and efficacy, and/or reduced systematic toxicity.

[0010] One aspect of the present invention relates to a tetravalent antibody molecule. The tetravalent antibody may be a dimer of a bispecific scFv fragment including a first binding site for a first antigen, a second binding site for a second antigen. The two binding sites may be joined together via a linker domain. In embodiments, the scFv fragment is a tandem scFv, the linker domain includes an immunoglobulin hinge region (e.g., an IgG1, an IgG2, an IgG3, and an IgG4 hinge region) amino acid sequence. In embodiments, the immunoglobulin hinge region amino acid sequence may flanked by a flexible linker amino acid sequence, e.g., having the amino acid sequence (GGGS)_{X1-6} (SEQ ID NO: 1906), (GGGGS)_{X1-6} (SEQ ID NO: 1907), and GSAGSAAGSGEF (SEQ ID NO: 1908). In embodiments, the linker domain includes at least a portion of an immunoglobulin Fc domain, e.g., an IgG1, an IgG2, an IgG3, and an IgG4 Fc domain. The at least a portion of the immunoglobulin Fc domain may be a CH2 domain. The Fc domain may be linked to the C-terminus of an immunoglobulin hinge region (e.g., an IgG1, an IgG2, an IgG3, and an IgG4 hinge region) amino acid sequence. The linker domain may include a flexible linker amino acid sequence (e.g., (GGGS)_{X1-6} (SEQ ID NO: 1906), (GGGGS)_{X1-6} (SEQ ID NO: 1907), and GSAGSAAGSGEF (SEQ ID NO: 1908)) at one terminus or at both termini.

[0011] Another aspect, the present invention relates to nucleic acid construct. The construct may include nucleic acid molecules encoding: a light chain variable region and a heavy chain variable region of an antibody that can specifically bind to a first antigen; a light chain variable region and a heavy chain variable region of an antibody that can specifically bind to a second antigen; and a linker domain. In embodiments, the linker domain is an immunoglobulin hinge region (e.g., an IgG1, an IgG2, an IgG3, and an IgG4 hinge region) amino acid sequence. In embodiments, the linker domain is at least a portion of an immunoglobulin Fc domain, e.g., an IgG1, an IgG2, an IgG3, and an IgG4 Fc domain. The at least a portion of the immunoglobulin Fc domain may be a CH2 domain. The Fc domain may be linked to the C-terminus of an immunoglobulin hinge region (e.g., an IgG1, an IgG2, an IgG3, and an IgG4 hinge region) amino acid sequence. The linker domain may include a flexible linker amino acid sequence (e.g., (GGGS)X1-6 (SEQ ID NO: 1906), (GGGGS)X1-6 (SEQ ID NO: 1907), and GSAGSAAGSGEF (SEQ ID NO: 1908)) at one terminus or at both termini.

[0012] Yet another aspect of the present invention is a vector including the nucleic acid construct of the above aspect.

[0013] Another aspect of the present invention is a host cell (e.g., a T-cell, a B-cell, a follicular T-cell, and an NK-cell) which includes the vector of the above aspect.

[0014] An aspect of the present invention is a chimeric antigen receptor (CAR). The CAR may include an intracellular signaling domain, a transmembrane domain and an extracellular domain including the tetravalent antibody molecule of any of the above aspects or embodiments. In embodiments, the transmembrane domain further includes a stalk region positioned between the extracellular domain and the transmembrane domain and/or the transmembrane domain comprises CD28. In embodiments, the CAR further includes one or more additional costimulatory molecules (e.g., CD28, 4-1BB, ICOS, and OX40) positioned between the transmembrane domain and the intracellular signaling domain, e.g., a CD3 zeta chain.

[0015] Yet another aspect of the present invention is a genetically engineered cell. The genetically engineered cell may express and bear on its cell surface membrane the chimeric antigen receptor of an above aspect or embodiment. In embodiments, the cell is a T-cell (e.g., CD4+ and/or CD8+) or an NK cell. The cell may comprise a mixed population of CD4+ and CD8 cells+.

[0016] An aspect of the present invention is method for treating a disease or disorder. The method may include administering the tetravalent antibody molecule of an above aspect or embodiment. In embodiments, the disease or disorder is a CNS-related disease or disorder, e.g., a CNS cancer or a neurodegenerative disease. The CNS cancer may be a Glioblastoma (GBM). The neurodegenerative disease may be Amyotrophic Lateral Sclerosis, Parkinson's Disease, Alzheimer's Disease, or Huntington's Disease. In embodiments, the tetravalent antibody molecule recognizes and/or is bound by a CNS transport receptor, e.g., a transferrin receptor (TfR), VCAM-1, CD98 hc, and an insulin receptor. In this aspect and any above aspect or embodiment, the tetravalent antibody molecule augments transport across the blood brain barrier.

[0017] Any of the above aspects or embodiments may be combined with any other aspect or embodiment.

[0018] Unless otherwise defined, all technical and scientific terms used herein have the same meaning as commonly understood by one of ordinary skill in the art to which this invention pertains. Although methods and materials similar or equivalent to those described herein can be used in the practice of the present invention, suitable methods and materials are described below. All publications, patent applications, patents, and other references mentioned herein are expressly incorporated by reference in their entirety. In cases of conflict, the present specification, including definitions, will control. In addition, the materials, methods, and examples described herein are illustrative only and are not intended to be limiting.

[0019] Other features and advantages of the invention will be apparent from and encompassed by the following detailed description and claims.

### BRIEF DESCRIPTION OF THE DRAWINGS

[0020] FIG. 1 is an illustration showing the design and formation of a tetrameric bispecific antibody (tBsAb).

[0021] FIG. 2 is a schematic representation of the pcDNA3.1\1 scFv-hinge-scFv expression vector.

[0022] FIG. 3A is an SDS gel showing a synthetic tetramer linker that was digested using NotI and BsiWI and then inserted into tetramer expressing vector. FIG. 3B is an SDS gel showing the purification of a tBsAb according to the invention.

[0023] FIG. 4A is an illustration showing the method for detection of antibody binding affinity of a tBsAb. FIG. 4B to FIG. 4C are graphs showing data when plates were coated with CCR4-Fc (B) or with PD-L1-Fc (C) and then incubated with tetravalent bispecific (anti-CCR4 and anti-PD-L1) and control antibodies. The result showed this tetravalent antibody could bind to both CCR4-Fc and PD-L1-Fc in a dose dependent manner.

[0024] FIG. 5 is a graph showing that anti-CAIX-PD-L1 bispecific mAb binds to CAIX-Fc fusion protein.

[0025] FIG. 6 is a graph showing that anti-CAIX-PD-L1 bispecific mAb binds to PD-L1-Fc fusion protein.

[0026] FIG. 7A is an illustration of how linker lengths can be changed to optimize bispecific mAb binding. FIG. 7A discloses SEQ ID NOS 1910-1912, respectively, in order of appearance. FIG. 7B is a schematic of a tBsAb sequence. FIG. 7B discloses SEQ ID NOS 1913-1915, respectively, in order of appearance.

[0027] FIG. 8 A. αGITR-αPD-L1 tBsAb engagement. The tBsAb binds to the GITR protein on T cells and PD-L1 protein on tumor cells. B. Schematic representation of the tBsAb format which is achieved through interchain disulfide bond formation between cysteine residues of the hinge region.

[0028] FIG. 9 A. Basic structure of the two scFvs linked to form the tBsAb. Figure discloses “His6” as SEQ ID NO: 1084. FIG. 9 B. Bispecific dimeric taFv directed against GITR and PD-L1. Each V_{H} and V_{L} pair is connected by a linker of 15 residues to form scFv. Two scFv are connected by a linker-hinge-linker (55 residues). The hinge region has two cysteine residues allowing the pairing of two taFv through disulfide bridges under oxidative conditions.

[0029] FIG. 10 A. Basic structure of the tandem scFv. Figure discloses “His6” as SEQ ID NO: 1084. FIG. 10 B. Trifunctional tBsAb directed against GITR and PD-L1 with an additional CH2 domain. Each V_{H} and V_{L} pair is connected by linker of 15 residues. Two scFv are connected by a linker-hinge-CH2-linker domain. The hinge region has two cysteine residues allowing the pairing of two tandem scFv through disulfide bridges under oxidative conditions. The N-terminal end of the CH2 domain can bind Fc-γ or C1q. The resulting format is a trifunctional tBsAb.

[0030] Figure ii Mechanism of action of αGITR-αPD-L1 tBsAb. FIG. 11 A. Tumor cells overexpress the PD-L1 protein. The PD-1/PD-L1 interaction inhibits an effective T cell activation and promotes immune suppression and adaptive immune resistance. FIG. 11 B. The αGITR-αPD-L1 tBsAb may enhance immune response. The αPD-L1 arm blocks PD-1/PD-L1 pathway and may therefore inhibit T cell exhaustion and abrogate T reg suppression. The αGITR arm acts as an agonist on the co-stimulator GITR receptor, resulting in upregulation of GITR expression enhancing T cell activation and proliferation.

[0031] FIG. 12 Schematic representation of the αGITR-αPD-L1 cloning process. The donor vector and the pcDNA 3.4 expression vector were digested with SfI and NotI restriction enzymes. The V_{H}GITR-V_{L}GITR gene was isolated and subsequently ligated to each other. The final plasmid resulted in the αGITR-αPD-L1 clone.

[0032] FIG. 13 Schematic representation of the control plasmid (1) cloning process. The pcDNA3.1 vector and the expression vector pcDNA 3.4 were digested with SfI and NotI restriction enzymes. The V_{H}F10-V_{L}F10 gene was isolated and subsequently ligated to the pcDNA 3.4 expression vector. The final plasmid resulted in the αGITR-αPD-L1 clone.

[0033] FIG. 14 Schematic representation of the control plasmids (2) and (3) cloning process. The isolated F10 V_{H} and V_{L} DNA and the recipient vector pcDNA 3.4 were digested with BsiWI and BamHI restriction enzymes and subsequently ligated to each other. The final plasmid resulted in the final αGITR1-αPD-L1 and αGITR10-αPD-L1 clone.

[0034] FIG. 15 Schematic representation of the cloning strategy for the αGITR-αPD-L1 with CH2 construct. The HindIII restriction site was introduced into the pcDNA 3.4 expression vector by site directed mutagenesis. The isolated CH2 fragment and the expression vector were subsequently digested and ligated to each other to finalize the construct αGITR-αPD-L1 with CH2.

[0035] FIG. 16 Restriction enzyme analysis (REA) of recipient pcDNA 3.4 vector, six V_{H}GITR-V_{L}GITR inserts and one V_{H}F10-V_{L}F10 insert. Shown is an ethidium bromide stained 1% agarose gel of DNA electrophoresed in TAE buffer. All plasmids were digested with SfI and NotI restriction enzymes. Lane 1: shown is a 7.5 kb digested recipient pcDNA 3.4 vector. The lower band between 500 and 1000 bp is a previously-used scFv insert (from the Marasco Laboratory). Lanes 2-6: Lower bands represent the 800 bp V_{H}GITR-linker-V_{L}GITR inserts. The larger bands clustered at 8 kb are the double digested descendent vectors. Lane 7: The 800 bp V_{H}F10-linker-V_{L}F10 inserts is visualized in the lower band clustered between 500 and 1000 bp. The lane “bp” represents the 1 kb DNA ladder (NEB).

[0036] FIG. 17 REA of V_{H}F10-linker-V_{L}F10 cDNA and recipient pcDNA 3.4 expression (containing V_{H}GITR1-V_{L}GITR1 or V_{H}GITR10-V_{L}GITR10, respectively). Shown is an ethidium bromide stained 1% agarose gel of DNA electrophoresed in TAE buffer. The recipient expression vectors and the insert were digested with BsiWI and BamHI restriction enzymes. Lane 1: shown is a single band clustered at 800 bp, representing the V_{H}F10-linker-V_{L}F10 (scFv) fragment isolated by PCR. Lanes 2 and 3: The upper two bands visualize the pcDNA 3.4 expression vectors containing V_{H}GITR1-V_{L}GITR1 (lane 2) and V_{H}GITR10-V_{L}GITR10 (lane 3). Both comprise 7500 bp and can be detected at the correct level of the ladder. The lower bands in lanes 2 and 3 clustered between 500 and 1000 bp represent the digested V_{H}PD-L1-V_{L}PD-L1 fragment separated from its vector. The lane “bp” corresponds to the 1 kb DNA ladder (NEB).

[0037] FIG. 18 Analysis of purified tBsAbs by SDS-PAGE. Shown is a Coomassie blue stained SDS gel of protein electrophoresed in MES buffer. 3-5 μg of protein sample was loaded and separated on the gel under (A) reducing and (B) non-reducing conditions. Lanes 1-8: Under non-reducing conditions, the SDS PAGE revealed two major bands of each protein. The higher bands have an apparent molecular weight between 80 kDa and 115 kDa and the lower molecular weight bands between 70 and 80 kDa. In the non-reduced SDS-gel analysis, some weak but high molecular weight bands (>180 kDa) can be observed. The SDS-gel analysis under reducing conditions (10% DTT; 70° C. for 10 minutes) displays only one band with an apparent molecular weight between 70 and 80 kDa. Lane 9: Under non-reducing conditions, a single band is shown with an apparent molecular weight slightly over 140 kDa. The visualization of two bands under reducing conditions emphasizes the correct expression of αGITR IgG that display separated heavy and light chains (50 kDa and 25 kDa). The lanes kDa represent the benchmark pre-stained protein ladder (Invitrogen) under the corresponding conditions (4-12% gel concentration run in MES buffer).

[0038] FIG. 19 ELISA absorbance values of αGITR-αPD-L1 tBsAbs, F10-αPD-L1 tBsAb and αPD-L1 mAb tested against passively immobilized PD-L1 antigen. A concentration range of each αGITR-αPD-L1 (0.0001 mg/mL-1 mg/mL; horizontal axis) was subjected to ELISA on PD-L1 antigen. The results show the mean and standard deviation of the absorbance at 450 nm (vertical axis). Each sample was run in triplicates at every concentration. The raw signal intensity was corrected for the background signal by subtracting the mean signal of wells incubated in the absence of the primary antibody from the wells where primary antibody was added.

[0039] FIG. 20 Cell-based ELISA testing αGITR1-αPD-L1 and αGITR10-αPD-L1 antibodies binding against GITR+ expressing CF2 cells fixed with acetone-methanol. The F10-αPD-L1 antibody represents the negative control. All antibodies were tested using a range of serial 1:3 dilutions ranging from 3.3 mg/mL to 0.0046 mg/mL. All antibodies were tested against 1000 GITR+CF2 cells per well. Each bar represents an average obtained from triplicate samples (deviations indicated by bars). The raw signal intensity was corrected for the background signal by subtracting the mean signal of wells incubated in the absence of the primary antibody from the wells where primary antibody was added.

[0040] FIG. 21 Cell based ELISA testing αGITR1-αPD-L1 and αGITR10-αPD-L1 antibodies binding against GITR+ expressing CF2 cells fixed with 8% paraformaldehyde. The F10-αPD-L1 antibody represents the negative control. All antibodies were tested using a range of serial 1:3 dilutions ranging from 3.3 mg/mL to 0.0046 mg/mL. All antibodies were tested against 1000 GITR+CF2 cells per well. Each bar represents an average obtained from triplicate samples (deviations indicated by bars). The raw signal intensity was corrected for the background signal by subtracting the mean signal of wells incubated in the absence of the primary antibody from the wells where primary antibody was added.

[0041] FIG. 22 Cell-based ELISA testing αGITR10-αPD-L1 and commercial αGITR10 mAb antibodies binding against GITR+ expressing CF2 cells fixed with 8% paraformaldehyde. The F10-αPD-L1 antibody represents the negative control. All antibodies were tested using a range of serial 1:2 dilutions ranging from 5 mg/mL to 0.078 mg/mL. All antibodies were tested against 10,000 GITR+CF2 cells per well. Each bar represents an average obtained from triplicate samples (deviations indicated by bars). The raw signal intensity was corrected for the background signal by subtracting the mean signal of wells incubated in the absence of the primary antibody from the wells where primary antibody was added.

[0042] FIG. 23 A. Flow cytometric analysis of fluorescent-activated αGITR10-αPD-L1 tBsAb (anti-His Alexa 488 (APC) conjugated) tested with GITR+CF2 cells. FIG. 23 B. Flow cytometric analysis of fluorescent-activated αGITR10 IgG Ab (anti human IgG Fc (FITC conjugated) tested with GITR+CF2 cells. Horizontal lines indicate the intensity signal of fluorescence and the vertical axis indicates the cell counts. Each individual picture represents different concentration of αGITR10-αPD-L1 with constant cell number.

[0043] FIG. 24 A. Flow cytometric analysis of fluorescent-activated αGITR1-αPD-L1 tBsAb (anti-His Alexa 488 (APC) conjugated) tested with GITR+CF2 cells. FIG. 24 B. Flow cytometric analysis of fluorescent-activated αGITR10 IgG Ab (anti human IgG Fc (FITC conjugated) tested with GITR+CF2 cells. Horizontal lines indicate the intensity signal of fluorescence and the vertical axis indicates the cell counts. Each individual picture represents different concentration of αGITR10-αPD-L1 (FIG. 24 A) and αGITR10 IgG (FIG. 24 B) with constant cell number.

[0044] FIG. 25 Restriction enzyme analysis (REA) of 16 clones. Shown is an ethidium bromide stained 1% agarose gel of DNA electrophoresed in TAE buffer. All plasmids were digested with HindIII and BamHI restriction enzymes. Two bands are shown in lane No. 10: The band clustered between 6 kb and 8 kb represents the digested recipient pcDNA 3.4 vector (7.5 kb). The lower band between 500 and 1000 bp indicates a close approximation to the expected theoretical size of 800 bp of the fragment isolated with HindIII and BamHI restriction enzymes. The lane “bp” represents the 1 kb DNA ladder.

[0045] FIG. 26 REA of clone 10 (GITR10-PDL1 with HindIII) and GITR10-PDL1 (without HindIII restriction site). Shown is an ethidium bromide stained 1% agarose gel of DNA electrophoresed in TAE buffer. Both plasmids were digested with only HindIII (lane 1), only NotI (lane 2) and with HindIII and NotI simultaneously (lane 3). The digestions of clone No. 10 with a single enzyme (lanes 1 & 2) resulted one band clustered around 8000 bp. The digestion of clone No. 10 with both enzymes (lane 3) resulted in the generation of two fragments, of which the smaller-sized band is clustered below 500 bp. The digestion of αGITR10-αPD-L1 with only HindIII restriction site (lane 1), revealed a supercoiled plasmid DNA.

[0046] FIG. 27 Restriction enzyme digestion analysis of vector GITR10-PDL1 (containing HindIII restriction site) and CH2 fragment. Shown is an ethidium bromide stained 1% agarose gel of DNA electrophoresed in TAE buffer. Lane 1: single digestion of the αGITR-αPD-L1 with HindIII. Lane 2: The CH2 fragment digested with HindIII resulted in a band clustered below the 500 bp mark of the ladder. The lane “bp” corresponds to the 1 kb DNA ladder.

[0047] FIG. 28 Analysis of purified αGITR10-αPD-L1 with CH2 BsAb by SDS-PAGE. Shown is a Coomassie blue stained SDS gel of protein electrophoresed in MES buffer. 3-5 μg of protein sample was loaded and separated on the gel under (R) reducing and (NR) non-reducing conditions. Under non-reducing conditions, the SDS PAGE revealed two major bands of each protein. The higher band has an apparent molecular of around 140 kDa and the lower hand has a molecular weight of 80 kDa, correlating with the theoretical size of dimeric (150 kDa) and monomeric (75 kDa) BsAbs. The SDS-gel analysis under reducing conditions (10% DTT; 70° C. for 10 minutes) displays only one band with an apparent molecular weight between around 80 kDa and reinforces the correct expression of tBsAb that can be reduced by its disulfide bridges in the hinge region. The lane “kDa” represents the benchmark pre-stained protein ladder (Invitrogen) under the corresponding conditions (4-12% gel concentration run in MES buffer).

[0048] FIG. 29 Cell-based ELISA testing αGITR10-αPD-L1 with CH2 and αGITR10 IgG antibodies binding against GITR+ expressing CF2 cells fixed with 8% paraformaldehyde. The F10-αPD-L1 antibody represents the negative control. All antibodies were tested using a range of serial 1:2 dilutions ranging from 5 mg/mL to 0.16 mg/mL. All antibodies were tested against 10,000 GITR+CF2 cells per well. Each bar represents an average obtained from triplicate samples (deviations indicated by bars). The raw signal intensity was corrected for the background signal by subtracting the mean signal of wells incubated in the absence of the primary antibody from the wells where primary antibody was added.

[0049] FIG. 30 ADCC activity of αGITR10-αPD-L1 with CH2 antibody. The ADCC activity of αGITR10-αPD-L1 with CH2 and was measured at varying concentrations. All antibodies were serially diluted (1:2), starting the highest concentration at 20 mg/mL until 0.02 mg/mL and tested against 20,000 GITR+CF2 cells per well. The ratio of effector cells (GITR+CF2) to target cells (Wils-2) was 5:1. The αGITR IgG represents the positive control and F10-αPD-L1 the negative control. The vertical axis represents the raw value of luciferase activity in the effector cell quantified with luminescence readout. Each sample was run in triplicate at every concentration; the mean standard deviation is indicated in brackets. The background of GITR+CF2 cells in RPMI medium was subtracted from the obtained values.

[0050] FIG. 31 αGITR10-αPD-L1 with CH2 antibody mediated CDC activity via mouse complement. Percentage of GITR+CF2 cell lysis obtained with serial dilutions of αGITR10-αPD-L1 tBsAb and the controls αGITR mAb (positive), αGITR10-αPD-L1 (negative) determined by the CDC assay. All antibodies were serially diluted (1:10), starting the highest concentration at 20 mg/mL until 0.2 mg/mL and tested against 10,000 GITR+CF2 cells per well. The vertical axis represents the percentage of lysis. It is calculated as ratio of obtained sample signal to the signal intensity from fully lysed GITR+CF2 cells. Each sample was run in triplicate at every concentration; the mean standard deviation is indicated in brackets. The background of GITR+CF2 cells in RPMI medium was subtracted from the obtained values. Each bar represents the simple average obtained from triplicate samples (standard deviations indicated by brackets).

[0051] FIG. 32 Cell-based ELISA testing αGITR1-αPD-L1 and αGITR10-αPD-L1 antibodies binding against CF2 cells (without GITR expression) fixed with 8% paraformaldehyde. The F10-αPD-L1 antibody represents the negative control. All antibodies were tested using a range of serial 1:3 dilutions ranging from 3.3 mg/mL to 0.0046 mg/mL. All antibodies were tested against 1000 GITR-CF2 cells per well. Each bar represents an average obtained from triplicate samples (deviations indicated by bars). The raw signal intensity was corrected for the background signal by subtracting the mean signal of wells incubated in the absence of the primary antibody from the wells where primary antibody was added.

[0052] FIG. 33 Cell-based ELISA testing αGITR10-αPD-L1 and αGITR10 IgG antibodies binding against CF2 cells (without GITR expression) fixed with 8% paraformaldehyde. The F10-αPD-L1 antibody represents the negative control. All antibodies were tested using a range of serial 1:2 dilutions ranging from 5 mg/mL to 0.078 mg/mL. All antibodies were tested against 10,000 GITR-CF2 cells per well. Each bar represents an average obtained from triplicate samples (deviations indicated by bars). The raw signal intensity was corrected for the background signal by subtracting the mean signal of wells incubated in the absence of the primary antibody from the wells where primary antibody was added.

[0053] FIG. 34 Cell-based ELISA testing αGITR10-αPD-L1 with CH2 and αGITR10 IG antibodies binding against GITR-CF2 cells fixed with 8% paraformaldehyde. The F10-αPD-L1 antibody represents the negative control. All antibodies were tested using a range of serial 1:2 dilutions ranging from 5 mg/mL to 0.16 mg/mL. All antibodies were tested against 10,000 GITR+CF2 cells per well. Each bar represents an average obtained from triplicate samples (deviations indicated by bars). The raw signal intensity was corrected for the background signal by subtracting the mean signal of wells incubated in the absence of the primary antibody from the wells where primary antibody was added.

[0054] FIG. 35 Control set-up for Flow cytometric analysis of fluorescent-activated αGITR1-αPD-L1 antibody. Lanes 1 to 6 show the controls set up for GITR+CF2 cells. Lanes 7 to 9 refer to the controls set up for GITR-CF2 cells.

### DETAILED DESCRIPTION OF THE INVENTION

[0055] The invention relates to bispecific antibody contains two binding sites for each receptor (i.e. a tetravalent bispecific antibody or “tBsAb”), systems and methods of producing same.

[0056] The clinical development of bispecific antibodies (BsAb) as therapeutics has been hampered by the difficulty in preparing the materials in sufficient quantity and quality by traditional methods. In recent years, a variety of recombinant methods have been developed for efficient production of BsAb, both as antibody fragments and as full-length IgG-like molecules. These recombinant antibody molecules possess dual antigen-binding capability with, in most cases, monovalency to each of their target antigens. The present invention provides an efficient approach for the production of a novel tetravalent BsAb (tBsAb), with two antigen-binding sites to each of its target antigens, genetically engineering a scFV bispecific antibody and fusing the two together.

[0057] Compared to the bispecific/divalent antibody, the tBsAb binds more efficiently to both of its target antigens and is more efficacious in blocking ligand binding to the receptors. Additionally, expression of the tBsAb in mammalian cells yielded higher level of production and better antibody activity. Importantly, the tBsAbs' exhibit higher stability and longer half-life compared to monovalent bispecific antibodies. One drawback of monovalent bispecific antibodies is their small size and therefor short serum half-life requiring administration in continuous low doses for several weeks. In contrast, the longer half-life of the tBsAbs of the invention solves this problem and therefore more suitable for clinical applications. This design and expression for tBsAb should be applicable to any pair of antigen specificities.

[0058] Preferably, the tBsAb is specific for BMCA, CAIX, CCR4, PD-L1, PD-L2, PD1, Glucocorticoid-Induced Tumor Necrosis Factor Receptors (GITR), Severe acute respiratory syndrome (SARS), influenza, flavivirus or Middle East Respiratory Syndrome (MERS).

[0059] Exemplary antibodies useful in constructing the tBsAb according to the invention includes antibodies disclosed in for example: WO/2005/060520, WO/2006/089141, WO/2007/065027, WO/2009/086514, WO/2009/079259, WO/2011/153380, WO/2014/055897, WO 2015/143194, WO 2015/164865, WO 2013/166500, WO 2014/144061, WO 2016/057488, WO 2016/054638, WO/2016/164835, PCT/US2016/026232, PCT/US2017/050093, PCT/US2017/050327 and PCT/US2017/043504 the contents of which are hereby incorporated by reference in their entireties.

### PDL1 (68)

[0060] Exemplary anti-PDL1 antibodies include antibodies having a _{VH} nucleotide sequence having SEQ ID NO: 1485 and a _{VL} nucleotide sequence having SEQ ID NO: 1487; a VH nucleotide sequence having SEQ ID NO: 1485 and a VL nucleotide sequence having SEQ ID NO: 1487; a VH nucleotide sequence having SEQ ID NO: 1489 and a VL nucleotide sequence having SEQ ID NO: 1491; a VH nucleotide sequence having SEQ ID NO: 1493 and a VL nucleotide sequence having SEQ ID NO: 1495; a VH nucleotide sequence having SEQ ID NO: 1497 and a VL nucleotide sequence having SEQ ID NO: 1499; a VH nucleotide sequence having SEQ ID NO: 1501 and a VL nucleotide sequence having SEQ ID NO: 1503; a VH nucleotide sequence having SEQ ID NO: 1505 and a VL nucleotide sequence having SEQ ID NO: 1507; a VH nucleotide sequence having SEQ ID NO: 1509 and a VL nucleotide sequence having SEQ ID NO: 1511; a VH nucleotide sequence having SEQ ID NO: 1513 and a VL nucleotide sequence having SEQ ID NO: 1515; a VH nucleotide sequence having SEQ ID NO: 1517 and a VL nucleotide sequence having SEQ ID NO: 1519; a VH nucleotide sequence having SEQ ID NO: 1521 and a VL nucleotide sequence having SEQ ID NO: 1523; a VH nucleotide sequence having SEQ ID NO: 1525 and a VL nucleotide sequence having SEQ ID NO: 1527; a VH nucleotide sequence having SEQ ID NO: 1529 and a VL nucleotide sequence having SEQ ID NO: 1531; a VH nucleotide sequence having SEQ ID NO: 1533 and a VL nucleotide sequence having SEQ ID NO: 1535; a VH nucleotide sequence having SEQ ID NO: 1537 and a VL nucleotide sequence having SEQ ID NO: 1539.

[0061] Exemplary anti-PDL1 antibodies include antibodies having a VH amino acid sequence having SEQ ID NO: 970 and a VL amino acid sequence having SEQ ID NO: 971; a VH amino acid having SEQ ID NO: 1486 and a VL polypeptide sequence having SEQ ID NO: 1488 a VH amino acid having SEQ ID NO: 1490 and a VL polypeptide sequence having SEQ ID NO: 1492 a VH amino acid having SEQ ID NO: 1494 and a VL polypeptide sequence having SEQ ID NO: 1496 a VH amino acid having SEQ ID NO: 1498 and a VL polypeptide sequence having SEQ ID NO: 1500 a VH amino acid having SEQ ID NO: 1502 and a VL polypeptide sequence having SEQ ID NO: 1504 a VH amino acid having SEQ ID NO: 1506 and a VL polypeptide sequence having SEQ ID NO: 1508 a VH amino acid having SEQ ID NO: 1510 and a VL polypeptide sequence having SEQ ID NO: 1512 a VH amino acid having SEQ ID NO: 1514 and a VL polypeptide sequence having SEQ ID NO: 1516 a VH amino acid having SEQ ID NO: 1518 and a VL polypeptide sequence having SEQ ID NO: 1520 a VH amino acid having SEQ ID NO: 1522 and a VL polypeptide sequence having SEQ ID NO: 1524 a VH amino acid having SEQ ID NO: 1526 and a VL polypeptide sequence having SEQ ID NO: 1528 a VH amino acid having SEQ ID NO: 1530 and a VL polypeptide sequence having SEQ ID NO: 1532 a VH amino acid having SEQ ID NO: 1534 and a VL polypeptide sequence having SEQ ID NO: 1536 a VH amino acid having SEQ ID NO: 1538 and a VL polypeptide sequence having SEQ ID NO: 1540.

[0062] In other embodiments the anti-PDL1 antibodies have a heavy chain with three CDRs including the amino acid sequences SEQ ID NO: 1541, 1554, 1569 respectively and a light chain with three CDRs including the amino acid sequences 1584, 1599, 1610 respectively; or a heavy chain with three CDRs comprising the amino acid sequences 1543, 1556, 1571 and a light chain with three CDRs comprising the amino acid sequences 1586, 1600, 1612; or a heavy chain with three CDRs comprising the amino acid sequences 1544, 1557, 1572 and a light chain with three CDRs comprising the amino acid sequences 1587, 1601, 1613; or a heavy chain with three CDRs comprising the amino acid sequences 1545, 1558, 1573 and a light chain with three CDRs comprising the amino acid sequences 1588, 1602, 1614; or a heavy chain with three CDRs comprising the amino acid sequences 1546, 1559, 1574 and a light chain with three CDRs comprising the amino acid sequences 1589, 1603, 1615; or a heavy chain with three CDRs comprising the amino acid sequences 1547, 1560, 1575 and a light chain with three CDRs comprising the amino acid sequences 1590, 1604, 1616; or a heavy chain with three CDRs comprising the amino acid sequences 1548, 1561, 1576 and a light chain with three CDRs comprising the amino acid sequences 1591, 1605, 1617; or a heavy chain with three CDRs comprising the amino acid sequences 1541, 1562, 1577 and a light chain with three CDRs comprising the amino acid sequences 1592, 1599, 1618; or a heavy chain with three CDRs comprising the amino acid sequences 1549, 1563, 1578 and a light chain with three CDRs comprising the amino acid sequences 1593, 1606, 1619; or a heavy chain with three CDRs comprising the amino acid sequences 1550, 1564, 1579 and a light chain with three CDRs comprising the amino acid sequences 1594, 1607, 1620; or a heavy chain with three CDRs comprising the amino acid sequences 1551, 1565, 1580 and a light chain with three CDRs comprising the amino acid sequences 1595, 1599, 1621; or a heavy chain with three CDRs comprising the amino acid sequences 1542, 1566, 1581 and a light chain with three CDRs comprising the amino acid sequences 1596, 1599, 1622; or a heavy chain with three CDRs comprising the amino acid sequences 1552, 1567, 1582 and a light chain with three CDRs comprising the amino acid sequences 1597, 1608, 1623; or a heavy chain with three CDRs comprising the amino acid sequences 1553, 1568, 1583 and a light chain with three CDRs comprising the amino acid sequences 1598, 1609, 1624.

### SARS (26)

[0063] Exemplary SARS neutralizing antibodies include antibodies having a _{VH} nucleotide sequence having SEQ ID NO: 1626 and a _{VL} nucleotide sequence having SEQ ID NO: 1628; a VH nucleotide sequence having SEQ ID NO: 1630 and a VL nucleotide sequence having SEQ ID NO: 1639; a VH nucleotide sequence having SEQ ID NO: 1634 and a VL nucleotide sequence having SEQ ID NO: 1640; a VH nucleotide sequence having SEQ ID NO: 1632 and a VL nucleotide sequence having SEQ ID NO: 1641; a VH nucleotide sequence having SEQ ID NO: 1633 and a VL nucleotide sequence having SEQ ID NO: 1642; a VH nucleotide sequence having SEQ ID NO: 1634 and a VL nucleotide sequence having SEQ ID NO: 1643; a VH nucleotide sequence having SEQ ID NO: 1635 and a VL nucleotide sequence having SEQ ID NO: 1644; a VH nucleotide sequence having SEQ ID NO: 1636 and a VL nucleotide sequence having SEQ ID NO: 1645; a VH nucleotide sequence having SEQ ID NO: 1637 and a VL nucleotide sequence having SEQ ID NO: 1646

### CXCR4 (33)

[0064] Exemplary anti-CXCR4 antibody include antibodies having a VH amino acid sequence having SEQ ID NO: 771 and a VL amino acid sequence having SEQ ID NO: 779; a VH amino acid sequence having SEQ ID NO: 772 and a VL amino acid sequence having SEQ ID NO: 780; a VH amino acid sequence having SEQ ID NO: 773 and a VL amino acid sequence having SEQ ID NO: 781; a VH amino acid sequence having SEQ ID NO: 774 and a VL amino acid sequence having SEQ ID NO: 782; a VH amino acid sequence having SEQ ID NO: 775 and a VL amino acid sequence having SEQ ID NO: 783; a VH amino acid sequence having SEQ ID NO: 776 and a VL amino acid sequence having SEQ ID NO: 784; a VH amino acid sequence having SEQ ID NO: 777 and a VL amino acid sequence having SEQ ID NO: 785; or a VH amino acid sequence having SEQ ID NO: 778 and a VL amino acid sequence having SEQ ID NO: 786.

[0065] In other embodiments the anti-CXCR4 antibodies have a heavy chain with three CDRs including the amino acid sequences SEQ ID NO: 803, 804, 805 respectively and a light chain with three CDRs including SEQ ID NO: 806, 807, 808 respectively; or a heavy chain with three CDRs comprising SEQ ID NO: 809, 810, 811, respectively and a light chain with three CDRs comprising SEQ ID NO: 812, 813, 814, respectively; or a heavy chain with three CDRs comprising SEQ ID NO: 815, 816, 817 respectively and a light chain with three CDRs comprising SEQ ID NO: 818, 819, 820 respectively; or a heavy chain with three CDRs comprising SEQ ID NO: 827, 828, or the sequence ELR respectively and a light chain with three CDRs comprising SEQ ID NO: 830, 831, 832 respectively; or a heavy chain with three CDRs comprising SEQ ID NO: 833, 834, 835, respectively and a light chain with three CDRs comprising SEQ ID NO: 836, 837, 838, respectively; or a heavy chain with three CDRs comprising SEQ ID NO: 839, 840, 841 respectively and a light chain with three CDRs comprising SEQ ID NO: 842, 843, 844 respectively.

### Carbonic Anhydrase IX (40)

[0066] Exemplary anti-CA IX antibodies include antibodies having a _{VH} amino acid sequence having SEQ ID NO: 845 and a _{VL} amino acid sequence having SEQ ID NO: 846; a VH amino acid sequence having SEQ ID NO: 847 and a VL amino acid sequence having SEQ ID NO: 868; a VH amino acid sequence having SEQ ID NO: 848 and a VL amino acid sequence having SEQ ID NO: 869; a VH amino acid sequence having SEQ ID NO: 849 and a VL amino acid sequence having SEQ ID NO: 870; a VH amino acid sequence having SEQ ID NO: 850 and a VL amino acid sequence having SEQ ID NO: 871; a VH amino acid sequence having SEQ ID NO: 851 and a VL amino acid sequence having SEQ ID NO: 872; a VH amino acid sequence having SEQ ID NO: 852 and a VL amino acid sequence having SEQ ID NO: 873; a VH amino acid sequence having SEQ ID NO: 853 and a VL amino acid sequence having SEQ ID NO: 874; a VH amino acid sequence having SEQ ID NO: 854 and a VL amino acid sequence having SEQ ID NO: 875; a VH amino acid sequence having SEQ ID NO: 855 and a VL amino acid sequence having SEQ ID NO: 876; a VH amino acid sequence having SEQ ID NO: 856 and a VL amino acid sequence having SEQ ID NO: 877; a VH amino acid sequence having SEQ ID NO: 857 and a VL amino acid sequence having SEQ ID NO: 878; a VH amino acid sequence having SEQ ID NO: 858 and a VL amino acid sequence having SEQ ID NO: 879; a VH amino acid sequence having SEQ ID NO: 859 and a VL amino acid sequence having SEQ ID NO: 880; a VH amino acid sequence having SEQ ID NO: 860 and a VL amino acid sequence having SEQ ID NO: 881; a VH amino acid sequence having SEQ ID NO: 861 and a VL amino acid sequence having SEQ ID NO: 882 a VH amino acid sequence having SEQ ID NO: 862 and a VL amino acid sequence having SEQ ID NO: 883; a VH amino acid sequence having SEQ ID NO: 863 and a VL amino acid sequence having SEQ ID NO: 884; a VH amino acid sequence having SEQ ID NO: 864 and a VL amino acid sequence having SEQ ID NO: 885; a VH amino acid sequence having SEQ ID NO: 865 and a VL amino acid sequence having SEQ ID NO: 886; a VH amino acid sequence having SEQ ID NO: 866 and a VL amino acid sequence having SEQ ID NO: 887; a VH amino acid sequence having SEQ ID NO: 867 and a VL amino acid sequence having SEQ ID NO: 888.

[0067] In other embodiments the anti-CA IX antibodies have a heavy chain with three CDRs including the amino acid sequences SEQ ID NO: 803, 804, 805 respectively and a light chain with three CDRs including the amino acid sequences 806, 807, 808 respectively; or a heavy chain with three CDRs comprising the amino acid sequences 899, 915, 909 and a light chain with three CDRs comprising the amino acid sequences 905, 906, 952 or a heavy chain with three CDRs comprising the amino acid sequences 899, 915, 909 and a light chain with three CDRs comprising the amino acid sequences 935, 943, 953 or a heavy chain with three CDRs comprising the amino acid sequences 899, 915, 909 and a light chain with three CDRs comprising the amino acid sequences 935, 906, 954 or a heavy chain with three CDRs comprising the amino acid sequences 910, 916, 923 and a light chain with three CDRs comprising the amino acid sequences 936, 944, 955 or a heavy chain with three CDRs comprising the amino acid sequences 899, 915, 909 and a light chain with three CDRs comprising the amino acid sequences 936, 944, 956 or a heavy chain with three CDRs comprising the amino acid sequences 911, 917, 924 and a light chain with three CDRs comprising the amino acid sequences 937, 945, 957 or a heavy chain with three CDRs comprising the amino acid sequences 899, 915, 909 and a light chain with three CDRs comprising the amino acid sequences 935, 946, 958 or a heavy chain with three CDRs comprising the amino acid sequences 899, 915, 909 and a light chain with three CDRs comprising the amino acid sequences 938, 946, 959 or a heavy chain with three CDRs comprising the amino acid sequences 899, 915, 909 and a light chain with three CDRs comprising the amino acid sequences 905, 946, 960 or a heavy chain with three CDRs comprising the amino acid sequences 899, 918, 925 and a light chain with three CDRs comprising the amino acid sequences 937, 947, 955 or a heavy chain with three CDRs comprising the amino acid sequences 899, 918, 926 and a light chain with three CDRs comprising the amino acid sequences 937, 945, 957 or a heavy chain with three CDRs comprising the amino acid sequences 912, 919, 927 and a light chain with three CDRs comprising the amino acid sequences 937, 943, 961 or a heavy chain with three CDRs comprising the amino acid sequences 899, 918, 928 and a light chain with three CDRs comprising the amino acid sequences 937, 906, 960 or a heavy chain with three CDRs comprising the amino acid sequences 899, 918, 928 and a light chain with three CDRs comprising the amino acid sequences 937, 906, 960 or a heavy chain with three CDRs comprising the amino acid sequences 913, 920, 929 and a light chain with three CDRs comprising the amino acid sequences 939, 948, 962 or a heavy chain with three CDRs comprising the amino acid sequences 899, 918, 930 and a light chain with three CDRs comprising the amino acid sequences 935, 944, 955 or a heavy chain with three CDRs comprising the amino acid sequences 899, 921, 931 and a light chain with three CDRs comprising the amino acid sequences 935, 944, 955 or a heavy chain with three CDRs comprising the amino acid sequences 912, 919, 932 and a light chain with three CDRs comprising the amino acid sequences 940, 949, 963 or a heavy chain with three CDRs comprising the amino acid sequences 899, 915, 909 and a light chain with three CDRs comprising the amino acid sequences 935, 943, 960 or a heavy chain with three CDRs comprising the amino acid sequences 914, 922, 933 and a light chain with three CDRs comprising the amino acid sequences 941, 950, 964 or a heavy chain with three CDRs comprising the amino acid sequences 912, 918, 934 and a light chain with three CDRs comprising the amino acid sequences 942, 951, 965.

### CC-Chemokine Receptor 4 (CCR4) (048)

[0068] Exemplary CC-chemokine receptor 4 (CCR4) antibodies include antibodies having a _{VH} nucleotide sequence having SEQ ID NO: 969 and a _{VL} nucleotide sequence having SEQ ID NO: 971; a _{VH} nucleotide sequence having SEQ ID NO: 969 and a V_{L} nucleotide sequence having SEQ ID NO: 972.

[0069] Exemplary CCR4 antibodies include antibodies having a _{VH} amino acid sequence having SEQ ID NO: 970 and a _{VL} amino acid sequence having SEQ ID NO: 971.

[0070] In other embodiments the CCR4 antibodies have a heavy chain with three CDRs including the amino acid sequences SEQ ID NO: 973, 974, 975 respectively and a light chain with three CDRs including the amino acid sequences 976, 977, 978 respectively.

### Middle East Respiratory Syndrome Coronavirus (MERS-CoV). (85)

[0071] Exemplary anti-Middle East Respiratory Syndrome coronavirus (MERS-CoV) antibody include antibodies having a VH nucleotide sequence having SEQ ID NO: 677 and a VL nucleotide sequence having SEQ ID NO:679; a VH nucleotide sequence having SEQ ID NO: 681 and a VL nucleotide sequence having SEQ ID NO:683; a VH nucleotide sequence having SEQ ID NO: 685 and a VL nucleotide sequence having SEQ ID NO:687; a VH nucleotide sequence having SEQ ID NO: 689 and a VL nucleotide sequence having SEQ ID NO:692; a VH nucleotide sequence having SEQ ID NO: 693 and a VL nucleotide sequence having SEQ ID NO:695; a VH nucleotide sequence having SEQ ID NO: 697 and a VL nucleotide sequence having SEQ ID NO:699; and a VH nucleotide sequence having SEQ ID NO: 701 and a VL nucleotide sequence having SEQ ID NO:703.

[0072] Exemplary anti-Middle East Respiratory Syndrome coronavirus (MERS-CoV) antibody include antibodies having a VH amino acid sequence SEQ ID NO: 678 and a VL amino acid sequence having SEQ ID NO: 680; a VH amino acid sequence SEQ ID NO: 682 and a VL amino acid sequence having SEQ ID NO: 684; a VH amino acid sequence SEQ ID NO: 686 and a VL amino acid sequence having SEQ ID NO: 688; a VH amino acid sequence SEQ ID NO: 690 and a VL amino acid sequence having SEQ ID NO: 692; a VH amino acid sequence SEQ ID NO: 694 and a VL amino acid sequence having SEQ ID NO: 696; a VH amino acid sequence SEQ ID NO: 698 and a VL amino acid sequence having SEQ ID NO: 700; and a VH amino acid sequence SEQ ID NO: 702 and a VL amino acid sequence having SEQ ID NO: 704.

[0073] In other embodiments the anti-Middle East Respiratory Syndrome coronavirus (MERS-CoV) antibody has a heavy chain with three CDRs including SEQ ID NOS 705, 706, and 707 and a light chain with three CDRs including SEQ ID NO: 722, the sequence QDS, and SEQ ID NO: 724; a heavy chain with three CDRs including SEQ ID NOS of 708, 709, and 710 and a light chain with three CDRs including SEQ ID NO: 725, the sequence RNN, and SEQ ID NO: 727; a heavy chain with three CDRs including SEQ ID NOS of 711, 712, and 713 and a light chain with three CDRs including SEQ ID NO: 728, the sequence GAS, and SEQ ID NO: 730; a heavy chain with three CDRs including SEQ ID NOS of 711, 735, and 715 and a light chain with three CDRs including SEQ ID NO: 731, the sequence DSS, and SEQ ID NO: 733; a heavy chain with three CDRs including SEQ ID NOS of 711, 735, and 716 and a light chain with three CDRs including SEQ ID NO: 737, the sequence WAS, and SEQ ID NO: 739; a heavy chain with three CDRs including SEQ ID NOS of 717, 718, and 719 and a light chain with three CDRs including SEQ ID NO: 736, the sequence TNN, and SEQ ID NO: 743; and a heavy chain with three CDRs including SEQ ID NOS of 714, 720, and 721 and a light chain with three CDRs including SEQ ID NO: 740, the sequence GAS, and SEQ ID NO: 741.

### GITR (93)

[0074] Exemplary anti-human GITR antibody include antibodies having a VH nucleotide sequence having SEQ ID NO: 1361 and a VL nucleotide sequence having SEQ ID NO: 1363; a VH nucleotide sequence having SEQ ID NO: 1365 and a VL nucleotide sequence having SEQ ID NO:1367; a VH nucleotide sequence having SEQ ID NO: 1369 and a VL nucleotide sequence having SEQ ID NO: 1371; a VH nucleotide sequence having SEQ ID NO: 1381 and a VL nucleotide sequence having SEQ ID NO: 1375; a VH nucleotide sequence having SEQ ID NO: 1377 and a VL nucleotide sequence having SEQ ID NO: 1379; a VH nucleotide sequence having SEQ ID NO: 1381 and a VL nucleotide sequence having SEQ ID NO: 1383; a VH nucleotide sequence having SEQ ID NO: 1385 and a VL nucleotide sequence having SEQ ID NO: 1387; a VH nucleotide sequence having SEQ ID NO: 1389 and a VL nucleotide sequence having SEQ ID NO:1391; a VH nucleotide sequence having SEQ ID NO: 1393 and a VL nucleotide sequence having SEQ ID NO: 1395; a VH nucleotide sequence having SEQ ID NO: 1397 and a VL nucleotide sequence having SEQ ID NO: 1398; or a VH nucleotide sequence having SEQ ID NO: 1401 and a VL nucleotide sequence having SEQ ID NO: 1403.

[0075] Exemplary anti-human GITR antibody include antibodies having a VH amino acid sequence having SEQ ID NO: 1362 and a VL amino acid sequence having SEQ ID NO: 1364; a VH amino acid having SEQ ID NO: 1366 and a VL polypeptide sequence having SEQ ID NO:1368; a VH amino acid sequence having SEQ ID NO: 1371 and a VL amino acid sequence having SEQ ID NO: 1372; a VH amino acid sequence having SEQ ID NO: 1382 and a VL amino acid sequence having SEQ ID NO: 1376; a VH nucleotide sequence having SEQ ID NO: 1378 and a VL nucleotide sequence having SEQ ID NO: 1380; a VH amino acid having SEQ ID NO: 1382 and a VL polypeptide sequence having SEQ ID NO: 1384; a VH amino acid sequence having SEQ ID NO: 1386 and a VL amino acid sequence having SEQ ID NO: 1388; a VH amino acid sequence having SEQ ID NO: 1390 and a VL amino acid sequence having SEQ ID NO: 1392; a VH amino acid having SEQ ID NO: 1394 and a VL polypeptide sequence having SEQ ID NO: 1396; a VH amino acid sequence having SEQ ID NO: 1399 and a VL amino acid sequence having SEQ ID NO: 1400; or a VH amino acid sequence having SEQ ID NO: 1402 and a VL amino acid sequence having SEQ ID NO: 1404.

[0076] In other embodiments the anti-human GITR antibody has a heavy chain with three CDRs including SEQ ID NOS 1405, 1406, and 1407 and a light chain with three CDRs including SEQ ID NO: 1408, the sequence TNN, and SEQ ID NO: 1410 respectively; a heavy chain with three CDRs including SEQ ID NOS 1411, 1412, and 1413 and a light chain with three CDRs including SEQ ID NO: 1414, the sequence GAS, and SEQ ID NO: 1416 respectively; a heavy chain with three CDRs including SEQ ID NOS 1417, 1418, and 1419 and a light chain with three CDRs including SEQ ID NO: 1420, the sequence ANN, and SEQ ID NO: 1422 respectively; a heavy chain with three CDRs including SEQ ID NOS 1423, 1424, and 1425 and a light chain with three CDRs including SEQ ID NO: 1426, the sequence DDR, and SEQ ID NO: 1428 respectively; a heavy chain with three CDRs including SEQ ID NOS 1429, 1430, and 1431 and a light chain with three CDRs including SEQ ID NO: 1432, the sequence DNK, and SEQ ID NO: 1434 respectively; a heavy chain with three CDRs including SEQ ID NOS 1435, 1436, and 1437 and a light chain with three CDRs including SEQ ID NO: 1438, the sequence EVS, and SEQ ID NO: 1440 respectively; a heavy chain with three CDRs including SEQ ID NOS 1441, 1442, and 1443 and a light chain with three CDRs including SEQ ID NO: 1444, the sequence HDN, and SEQ ID NO: 1446 respectively; a heavy chain with three CDRs including SEQ ID NOS 1447, 1448, and 1449 and a light chain with three CDRs including SEQ ID NO: 1450, SDN, and SEQ ID NO: 1452 respectively; a heavy chain with three CDRs including SEQ ID NOS 1453, 1454, and 1455 and a light chain with three CDRs including SEQ ID NO: 1456, DVH, and 1458 respectively; a heavy chain with three CDRs including SEQ ID NOS 1459, 1460, and 1461 and a light chain with three CDRs including SEQ ID NO: 1462, the sequence DDS, and SEQ ID NO: 1464 respectively; or a heavy chain with three CDRs including SEQ ID NOS 1465, 1466, and 1467 and a light chain with three CDRs including SEQ ID NO: 1468, TNN, and 1470 respectively.

### Flavivirus (73)

[0077] Exemplary anti-West Nile virus envelope protein E (WNE) antibody include antibodies having a VH nucleotide sequence having a VH amino acid sequence having SEQ ID NO: 1224 and a VL amino acid sequence having SEQ ID NO: 1226.

[0078] Exemplary anti-West Nile virus envelope protein E (WNE) antibody include antibodies having a VH nucleotide sequence having SEQ ID NO: 1225 and a VL nucleotide sequence having SEQ ID NO: 1227.

[0079] In other embodiments the anti-West Nile virus envelope protein E (WNE) antibody has a heavy chain with three CDRs including the SEQ ID NOS 1244, 1245, and 1246 and a light chain with three CDRs including the SEQ ID NOS 1247, 1248, and 1249 respectively.

### CCR4 (65)

[0080] Exemplary anti-CC-chemokine receptor 4 (CCR4) antibody include antibodies having a _{VH} nucleotide sequence having SEQ ID NO: 1329 and a _{VL} nucleotide sequence having SEQ ID NO: 1331; a _{VH} nucleotide sequence having SEQ ID NO: 1333 and a V_{L} nucleotide sequence having SEQ ID NO: 1335; a _{VH} nucleotide sequence having SEQ ID NO: 1337 and a V_{L} nucleotide sequence having SEQ ID NO: 1192; a _{VH} nucleotide sequence having SEQ ID NO: 1341 and a _{VL} nucleotide sequence having SEQ ID NO: 1343; or a _{VH} nucleotide sequence having SEQ ID NO: 1357 and a _{VL} nucleotide sequence having SEQ ID NO:1359.

[0081] Exemplary anti-CC-chemokine receptor 4 (CCR4) antibody include antibodies having a V_{H} amino acid sequence having SEQ ID NO: 1330 and a V_{L} amino acid sequence having SEQ ID NO: 1332; a V_{H} amino acid sequence having SEQ ID NO: 1334 and a V_{L} amino acid sequence having SEQ ID NO: 1336; a V_{H} amino acid sequence having SEQ ID NO: 1338 and a V_{L} amino acid sequence having SEQ ID NO: 1340; a V_{H} amino acid sequence having SEQ ID NO: 1342 and a V_{L} amino acid sequence having SEQ ID NO: 1344; or a V_{H} amino acid sequence having SEQ ID NO: 1358 and a V_{L} amino acid sequence having SEQ ID NO: 1360.

[0082] In other embodiments the anti-CC-chemokine receptor 4 (CCR4) antibody has a heavy chain with three CDRs including the SEQ ID NOS 1203, 1208, and 1211 and a light chain with three CDRs including the SEQ ID NOS 1207, 1209, and 1216 respectively; or a heavy chain with three CDRs including the SEQ ID NOS 1204, 1208, and 1212 and a light chain with three CDRs including the SEQ ID NOS 1207, 1209, and 1217 respectively; or a heavy chain with three CDRs including the SEQ ID NOS 1204, 1208, and 1213 and a light chain with three CDRs including the SEQ ID NOS 1207, 1209, and 1217 respectively; or a heavy chain with three CDRs including the SEQ ID NOS 1205, 1208, and 1214 and a light chain with three CDRs including the SEQ ID NOS 1207, 1209, and 1218 respectively; or a heavy chain with three CDRs including the SEQ ID NOS 1206, 1208, and 1210 and a light chain with three CDRs including the SEQ ID NOS 1207, 1209, and 1220 respectively; or a heavy chain with three CDRs including the SEQ ID NOS 1202, 1208, and 1210 and a light chain with three CDRs including the SEQ ID NOS 1207, 1209, and 1219 respectively.

### Human Immunoglobulin Heavy Chain Variable Region Germline Gene VH1-69 (57)

[0083] Exemplary anti-human immunoglobulin heavy chain variable region germline gene VH1-69 antibody include antibodies having a VH nucleotide sequence having SEQ ID NO: 1153 and a VL nucleotide sequence having SEQ ID NO: 1155; or a VH nucleotide sequence having SEQ ID NO: 1163 and a VL nucleotide sequence having SEQ ID NO:1155.

[0084] Exemplary anti-human immunoglobulin heavy chain variable region germline gene VH1-69 antibody include antibodies having a V_{H} amino acid sequence having SEQ ID NO: 1154 and a V_{L} amino acid sequence having SEQ ID NO: 1156; or a V_{H} amino acid sequence having SEQ ID NO: 1164 and a V_{L} amino acid sequence having SEQ ID NO: 1156.

[0085] In other embodiments the anti-human immunoglobulin heavy chain variable region germline gene VH1-69 antibody has a heavy chain with three CDRs including SEQ ID NOS 1157, 1158, and 1159 and a light chain with three CDRs including SEQ ID NO: 1160, the sequence HGT, and SEQ ID NO: 1162 respectively.

### Influenza (49)

[0086] Exemplary anti-influenza antibody include antibodies having a VH nucleotide sequence having SEQ ID NO: 981 and a VL nucleotide sequence having SEQ ID NO: 983; a VH nucleotide sequence having SEQ ID NO: 985 and a VL nucleotide sequence having SEQ ID NO: 989; a VH nucleotide sequence having SEQ ID NO: 987 and a VL nucleotide sequence having SEQ ID NO: 991; a VH nucleotide sequence having SEQ ID NO: 993 and a VL nucleotide sequence having SEQ ID NO: 997; a VH nucleotide sequence having SEQ ID NO: 995 and a VK nucleotide sequence having SEQ ID NO: 999; a VH nucleotide sequence having SEQ ID NO: 1001 and a VL nucleotide sequence having SEQ ID NO: 1005; a VH nucleotide sequence having SEQ ID NO: 1003 and a VL nucleotide sequence having SEQ ID NO: 1007; a VH nucleotide sequence having SEQ ID NO: 1009 and a VL nucleotide sequence having SEQ ID NO: 1011; a VH nucleotide sequence having SEQ ID NO: 1013 and a VL nucleotide sequence having SEQ ID NO: 1015; and a VH nucleotide sequence having SEQ ID NO: 1017 and a VK nucleotide sequence having SEQ ID NO: 1019; a VH nucleotide sequence having SEQ ID NO: 1020 and a VL nucleotide sequence having SEQ ID NO: 1022.

[0087] Exemplary anti-influenza antibody include antibodies having a VH amino acid sequence having SEQ ID NO: 982 and a VL amino acid sequence having SEQ ID NO: 984; a VH amino acid sequence having SEQ ID NO: 986 and a VL amino acid sequence having SEQ ID NO: 988; a VH amino acid sequence having SEQ ID NO: 986 and a VL amino acid sequence having SEQ ID NO: 990; a VH amino acid sequence having SEQ ID NO: 992 and a VL amino acid sequence having SEQ ID NO: 994; a VH amino acid sequence having SEQ ID NO: 992 and a VK amino acid sequence having SEQ ID NO: 996; a VH amino acid sequence having SEQ ID NO: 998 and a VL amino acid sequence having SEQ ID NO: 1000; a VH amino acid sequence having SEQ ID NO: 998 and a VL amino acid sequence having SEQ ID NO: 1002; a VH amino acid sequence having SEQ ID NO: 1004 and a VL amino acid sequence having SEQ ID NO: 1006; a VH amino acid sequence having SEQ ID NO: 1008 and a VL amino acid sequence having SEQ ID NO: 1010; a VH amino acid sequence having SEQ ID NO: 1012 and a VK amino acid sequence having SEQ ID NO: 1014; and a VH amino acid sequence having SEQ ID NO: 1016 and a VL amino acid sequence having SEQ ID NO: 1018.

[0088] In other embodiments the anti-influenza antibody has a heavy chain with three CDRs including SEQ ID NOS of 1023, 1031, and 1039 and a light chain with three CDRs including SEQ ID NOS 1047, 1059, and 1071; a heavy chain with three CDRs including SEQ ID NOS of 1023, 1032, and 1040 and a light chain with three CDRs including SEQ ID NOS 1048, 1060, and 1072; a heavy chain with three CDRs including SEQ ID NOS of 1025, 1032, and 1040 and a light chain with three CDRs including SEQ ID NOS 1057, 1069, and 1081; a heavy chain with three CDRs including SEQ ID NOS of 1026, 1033, and 1041 and a light chain with three CDRs including SEQ ID NOS 1049, 1061, and 1073; a heavy chain with three CDRs including SEQ ID NOS of 1026, 1033, and 1041 and a light chain with three CDRs including SEQ ID NOS 1054, 1066, and 1078; a heavy chain with three CDRs including SEQ ID NOS of 1027, 1034, and 1042 and a light chain with three CDRs including SEQ ID NOS 1050, 1062, and 1074; a heavy chain with three CDRs including SEQ ID NOS of 1027, 1034, and 1042 and a light chain with three CDRs including SEQ ID NOS 1056, 1068, and 1080; a heavy chain with three CDRs including SEQ ID NOS of 1028, 1035, and 1043 and a light chain with three CDRs including SEQ ID NOS 1051, 1063, and 1065; a heavy chain with three CDRs including SEQ ID NOS of 1028, 1036, and 1044 and a light chain with three CDRs including SEQ ID NOS 1052, 1064, and 1076; a heavy chain with three CDRs including SEQ ID NOS of 1029, 1037, and 1045 and a light chain with three CDRs including SEQ ID NOS 1053, 1065, and 1077; or a heavy chain with three CDRs including SEQ ID NOS of 1030, 1038, and 1046 and a light chain with three CDRs including SEQ ID NOS 1058, 1070, and 1082.

### Influenza (78)

[0089] Exemplary anti-influenza antibodies include antibodies having a _{VH} nucleotide sequence having SEQ ID NO: 397 and a _{VL} nucleotide sequence having SEQ ID NO: 398; a _{VH} nucleotide sequence having SEQ ID NO: 399 and a V_{L} nucleotide sequence having SEQ ID NO:400; a _{VH} nucleotide sequence having SEQ ID NO: 401 and a V_{L} nucleotide sequence having SEQ ID NO: 402; a V_{H} nucleotide sequence having SEQ ID NO: 403 and a V_{L} nucleotide sequence having SEQ ID NO: 404; or a V_{H} nucleotide sequence having SEQ ID NO: 405 and a _{VL} nucleotide sequence having SEQ ID NO:406; or a _{VH} nucleotide sequence having SEQ ID NO: 407 and a _{VL} nucleotide sequence having SEQ ID NO:408; or a _{VH} nucleotide sequence having SEQ ID NO: 409 and a _{VL} nucleotide sequence having SEQ ID NO:410; or a _{VH} nucleotide sequence having SEQ ID NO: 411 and a _{VL} nucleotide sequence having SEQ ID NO:412; or a _{VH} nucleotide sequence having SEQ ID NO: 413 and a _{VL} nucleotide sequence having SEQ ID NO:414; or a V_{H} nucleotide sequence having SEQ ID NO: 415 and a _{VL} nucleotide sequence having SEQ ID NO:416; or a _{VH} nucleotide sequence having SEQ ID NO: 417 and a _{VL} nucleotide sequence having SEQ ID NO:418; or a _{VH} nucleotide sequence having SEQ ID NO: 419 and a _{VL} nucleotide sequence having SEQ ID NO:420; or a _{VH} nucleotide sequence having SEQ ID NO: 421 and a _{VL} nucleotide sequence having SEQ ID NO:422; or a _{VH} nucleotide sequence having SEQ ID NO: 423 and a _{VL} nucleotide sequence having SEQ ID NO:424; or a _{VH} nucleotide sequence having SEQ ID NO: 425 and a _{VL} nucleotide sequence having SEQ ID NO:426; or a _{VH} nucleotide sequence having SEQ ID NO: 427 and a _{VL} nucleotide sequence having SEQ ID NO:428; or a _{VH} nucleotide sequence having SEQ ID NO: 429 and a _{VL} nucleotide sequence having SEQ ID NO:430; or a _{VH} nucleotide sequence having SEQ ID NO: 431 and a _{VL} nucleotide sequence having SEQ ID NO:432; or a _{VH} nucleotide sequence having SEQ ID NO: 433 and a _{VL} nucleotide sequence having SEQ ID NO:434; or a _{VH} nucleotide sequence having SEQ ID NO: 435 and a _{VL} nucleotide sequence having SEQ ID NO:436; or a _{VH} nucleotide sequence having SEQ ID NO: 437 and a _{VL} nucleotide sequence having SEQ ID NO:438; or a _{VH} nucleotide sequence having SEQ ID NO: 439 and a _{VL} nucleotide sequence having SEQ ID NO:440; or a _{VH} nucleotide sequence having SEQ ID NO: 441 and a _{VL} nucleotide sequence having SEQ ID NO:442; or a _{VH} nucleotide sequence having SEQ ID NO: 541 and a VL nucleotide sequence having SEQ ID NO: 542; or a VH nucleotide sequence having SEQ ID NO: 543 and a VL nucleotide sequence having SEQ ID NO: 544; or a VH nucleotide sequence having SEQ ID NO: 545 and a VL nucleotide sequence having SEQ ID NO: 546; or a VH nucleotide sequence having SEQ ID NO: 547 and a VL nucleotide sequence having SEQ ID NO: 548; or a VH nucleotide sequence having SEQ ID NO: 549 and a VL nucleotide sequence having SEQ ID NO: 550; or a VH nucleotide sequence having SEQ ID NO: 551 and a VL nucleotide sequence having SEQ ID NO: 552; or a VH nucleotide sequence having SEQ ID NO: 553 and a VL nucleotide sequence having SEQ ID NO: 554; or a VH nucleotide sequence having SEQ ID NO: 555 and a VL nucleotide sequence having SEQ ID NO: 556; or a VH nucleotide sequence having SEQ ID NO: 557 and a VL nucleotide sequence having SEQ ID NO: 558; or a VH nucleotide sequence having SEQ ID NO: 559 and a VL nucleotide sequence having SEQ ID NO: 560; or a VH nucleotide sequence having SEQ ID NO: 561 and a VL nucleotide sequence having SEQ ID NO: 562; or a VH nucleotide sequence having SEQ ID NO: 563 and a VL nucleotide sequence having SEQ ID NO: 564; or a VH nucleotide sequence having SEQ ID NO: 565 and a VL nucleotide sequence having SEQ ID NO: 566; or a VH nucleotide sequence having SEQ ID NO: 567 and a VL nucleotide sequence having SEQ ID NO: 568; or a VH nucleotide sequence having SEQ ID NO: 569 and a VL nucleotide sequence having SEQ ID NO: 570; or a VH nucleotide sequence having SEQ ID NO: 571 and a VL nucleotide sequence having SEQ ID NO: 572; or a VH nucleotide sequence having SEQ ID NO: 573 and a VL nucleotide sequence having SEQ ID NO: 574; or a VH nucleotide sequence having SEQ ID NO: 575 and a VL nucleotide sequence having SEQ ID NO: 576; or a VH nucleotide sequence having SEQ ID NO: 577 and a VL nucleotide sequence having SEQ ID NO: 578; or a VH nucleotide sequence having SEQ ID NO: 579 and a VL nucleotide sequence having SEQ ID NO: 580; or a VH nucleotide sequence having SEQ ID NO: 581 and a VL nucleotide sequence having SEQ ID NO: 582; or a VH nucleotide sequence having SEQ ID NO: 583 and a VL nucleotide sequence having SEQ ID NO: 584; or a VH nucleotide sequence having SEQ ID NO: 585 and a VL nucleotide sequence having SEQ ID NO: 586; or a VH nucleotide sequence having SEQ ID NO: 587 and a VL nucleotide sequence having SEQ ID NO: 588; or a VH nucleotide sequence having SEQ ID NO: 589 and a VL nucleotide sequence having SEQ ID NO: 590; or a VH nucleotide sequence having SEQ ID NO: 591 and a VL nucleotide sequence having SEQ ID NO: 592; or a VH nucleotide sequence having SEQ ID NO: 593 and a VL nucleotide sequence having SEQ ID NO: 594; or a VH nucleotide sequence having SEQ ID NO: 595 and a VL nucleotide sequence having SEQ ID NO: 596; or a VH nucleotide sequence having SEQ ID NO: 597 and a VL nucleotide sequence having SEQ ID NO: 598; or a VH nucleotide sequence having SEQ ID NO: 599 and a VL nucleotide sequence having SEQ ID NO: 600.

[0090] Exemplary anti-influenza antibodies antibody include antibodies having a _{VH} amino acid sequence having SEQ ID NO: 469 and a _{VL} amino acid sequence having SEQ ID NO: 470; a _{VH} amino acid having SEQ ID NO: 471 and a _{VL} polypeptide sequence having SEQ ID NO:472; a _{VH} amino acid sequence having SEQ ID NO: 473 and a _{VL} amino acid sequence having SEQ ID NO: 474; a _{VH} amino acid sequence having SEQ ID NO: 475 and a _{VL} amino acid sequence having SEQ ID NO: 476; or a _{VH} nucleotide sequence having SEQ ID NO: 477 and a _{VL} nucleotide sequence having SEQ ID NO:478; a _{VH} amino acid sequence having SEQ ID NO: 479 and a _{VL} amino acid sequence having SEQ ID NO: 480; a _{VH} amino acid sequence having SEQ ID NO: 481 and a _{VL} amino acid sequence having SEQ ID NO: 482; a _{VH} amino acid sequence having SEQ ID NO: 483 and a _{VL} amino acid sequence having SEQ ID NO: 484; a _{VH} amino acid sequence having SEQ ID NO: 485 and a _{VL} amino acid sequence having SEQ ID NO: 486; a _{VH} amino acid sequence having SEQ ID NO: 487 and a _{VL} amino acid sequence having SEQ ID NO: 488; a _{VH} amino acid sequence having SEQ ID NO: 489 and a _{VL} amino acid sequence having SEQ ID NO: 490; a _{VH} amino acid sequence having SEQ ID NO: 491 and a _{VL} amino acid sequence having SEQ ID NO: 492; a _{VH} amino acid sequence having SEQ ID NO: 493 and a _{VL} amino acid sequence having SEQ ID NO: 494; a _{VH} amino acid sequence having SEQ ID NO: 495 and a _{VL} amino acid sequence having SEQ ID NO: 496; a _{VH} amino acid sequence having SEQ ID NO: 497 and a _{VL} amino acid sequence having SEQ ID NO: 498; a _{VH} amino acid sequence having SEQ ID NO: 499 and a _{VL} amino acid sequence having SEQ ID NO: 500; a _{VH} amino acid sequence having SEQ ID NO: 501 and a _{VL} amino acid sequence having SEQ ID NO: 502; a _{VH} amino acid sequence having SEQ ID NO: 503 and a _{VL} amino acid sequence having SEQ ID NO: 504; a _{VH} amino acid sequence having SEQ ID NO: 505 and a _{VL} amino acid sequence having SEQ ID NO: 506; a _{VH} amino acid sequence having SEQ ID NO: 507 and a _{VL} amino acid sequence having SEQ ID NO: 508; a _{VH} amino acid sequence having SEQ ID NO: 509 and a _{VL} amino acid sequence having SEQ ID NO: 510; a _{VH} amino acid sequence having SEQ ID NO: 511 and a _{VL} amino acid sequence having SEQ ID NO: 512; a _{VH} amino acid sequence having SEQ ID NO: 513 and a _{VL} amino acid sequence having SEQ ID NO: 514; a _{VH} amino acid sequence having SEQ ID NO: 515 and a _{VL} amino acid sequence having SEQ ID NO: 516; a _{VH} amino acid sequence having SEQ ID NO: 517 and a _{VL} amino acid sequence having SEQ ID NO: 518; a _{VH} amino acid sequence having SEQ ID NO: 519 and a _{VL} amino acid sequence having SEQ ID NO: 520; a _{VH} amino acid sequence having SEQ ID NO: 521 and a _{VL} amino acid sequence having SEQ ID NO: 522; a _{VH} amino acid sequence having SEQ ID NO: 523 and a _{VL} amino acid sequence having SEQ ID NO: 524; a _{VH} amino acid sequence having SEQ ID NO: 525 and a _{VL} amino acid sequence having SEQ ID NO: 526; a _{VH} amino acid sequence having SEQ ID NO: 527 and a _{VL} amino acid sequence having SEQ ID NO: 528; a _{VH} amino acid sequence having SEQ ID NO: 529 and a _{VL} amino acid sequence having SEQ ID NO: 530; a _{VH} amino acid sequence having SEQ ID NO: 531 and a _{VL} amino acid sequence having SEQ ID NO: 532; a _{VH} amino acid sequence having SEQ ID NO: 533 and a _{VL} amino acid sequence having SEQ ID NO: 534; a _{VH} amino acid sequence having SEQ ID NO: 535 and a _{VL} amino acid sequence having SEQ ID NO: 536; a _{VH} amino acid sequence having SEQ ID NO: 537 and a _{VL} amino acid sequence having SEQ ID NO: 538; a _{VH} amino acid sequence having SEQ ID NO: 539 and a _{VL} amino acid sequence having SEQ ID NO: 540 a VH amino acid sequence having SEQ ID NO: 601 and a VL amino acid sequence having SEQ ID NO: 602 a VH amino acid sequence having SEQ ID NO: 603 and a VL amino acid sequence having SEQ ID NO: 604 a VH amino acid sequence having SEQ ID NO: 605 and a VL amino acid sequence having SEQ ID NO: 606 a VH amino acid sequence having SEQ ID NO: 607 and a VL amino acid sequence having SEQ ID NO: 608 a VH amino acid sequence having SEQ ID NO: 609 and a VL amino acid sequence having SEQ ID NO: 610 a VH amino acid sequence having SEQ ID NO: 611 and a VL amino acid sequence having SEQ ID NO: 612 a VH amino acid sequence having SEQ ID NO: 613 and a VL amino acid sequence having SEQ ID NO: 614 a VH amino acid sequence having SEQ ID NO: 615 and a VL amino acid sequence having SEQ ID NO: 616 a VH amino acid sequence having SEQ ID NO: 617 and a VL amino acid sequence having SEQ ID NO: 618 a VH amino acid sequence having SEQ ID NO: 619 and a VL amino acid sequence having SEQ ID NO: 620 a VH amino acid sequence having SEQ ID NO: 621 and a VL amino acid sequence having SEQ ID NO: 622 a VH amino acid sequence having SEQ ID NO: 623 and a VL amino acid sequence having SEQ ID NO: 624 a VH amino acid sequence having SEQ ID NO: 625 and a VL amino acid sequence having SEQ ID NO: 626 a VH amino acid sequence having SEQ ID NO: 627 and a VL amino acid sequence having SEQ ID NO: 628 a VH amino acid sequence having SEQ ID NO: 629 and a VL amino acid sequence having SEQ ID NO: 630 a VH amino acid sequence having SEQ ID NO: 631 and a VL amino acid sequence having SEQ ID NO: 632 a VH amino acid sequence having SEQ ID NO: 633 and a VL amino acid sequence having SEQ ID NO: 634 a VH amino acid sequence having SEQ ID NO: 635 and a VL amino acid sequence having SEQ ID NO: 636 a VH amino acid sequence having SEQ ID NO: 637 and a VL amino acid sequence having SEQ ID NO: 638 a VH amino acid sequence having SEQ ID NO: 639 and a VL amino acid sequence having SEQ ID NO: 640 a VH amino acid sequence having SEQ ID NO: 641 and a VL amino acid sequence having SEQ ID NO: 642 a VH amino acid sequence having SEQ ID NO: 643 and a VL amino acid sequence having SEQ ID NO: 644 a VH amino acid sequence having SEQ ID NO: 645 and a VL amino acid sequence having SEQ ID NO: 646 a VH amino acid sequence having SEQ ID NO: 647 and a VL amino acid sequence having SEQ ID NO: 648 a VH amino acid sequence having SEQ ID NO: 649 and a VL amino acid sequence having SEQ ID NO: 650 a VH amino acid sequence having SEQ ID NO: 651 and a VL amino acid sequence having SEQ ID NO: 652 a VH amino acid sequence having SEQ ID NO: 653 and a VL amino acid sequence having SEQ ID NO: 654 a VH amino acid sequence having SEQ ID NO: 655 and a VL amino acid sequence having SEQ ID NO: 656 a VH amino acid sequence having SEQ ID NO: 657 and a VL amino acid sequence having SEQ ID NO: 658 a VH amino acid sequence having SEQ ID NO: 659 and a VL amino acid sequence having SEQ ID NO: 660.

[0091] In other embodiments the anti-influenza antibodies antibody has a heavy chain with three CDRs including the amino acid sequences SEQ ID NO: 1, 37, 73 respectively and a light chain with three CDRs including SEQ ID NO: 109, the sequence WAS, SEQ ID NO: 181 respectively; or a heavy chain with three CDRs comprising SEQ ID NOS 2, 38, 74 respectively and a light chain with three CDRs comprising SEQ ID NO: 110, the sequence DDS, SEQ ID NO: 182, respectively; or a heavy chain with three CDRs comprising SEQ ID NOS 3, 39, 75 respectively and a light chain with three CDRs comprising SEQ ID NO: 111, the sequence AAS, SEQ ID NO: 183, respectively; or a heavy chain with three CDRs comprising SEQ ID NOS 4, 40, 76 respectively and a light chain with three CDRs comprising SEQ ID NO: 112, the sequence SNN, SEQ ID NO: 184, respectively; or a heavy chain with three CDRs comprising SEQ ID NOS 5, 41, 77 respectively and a light chain with three CDRs comprising SEQ ID NO: 113, the sequence SNN, SEQ ID NO: 185, respectively; or a heavy chain with three CDRs comprising SEQ ID NOS 6, 42, 78 respectively and a light chain with three CDRs comprising SEQ ID NO: 114, the sequence DVS, SEQ ID NO: 186, respectively; or a heavy chain with three CDRs comprising SEQ ID NOS 7, 43, 79 respectively and a light chain with three CDRs comprising SEQ ID NO: 115, the sequence EVT, SEQ ID NO: 187, respectively; or a heavy chain with three CDRs comprising SEQ ID NOS 8, 44, 80 respectively and a light chain with three CDRs comprising SEQ ID NO: 116, the sequence DND, SEQ ID NO: 188, respectively; or a heavy chain with three CDRs comprising SEQ ID NO: 9, 45, 81 respectively and a light chain with three CDRs comprising SEQ ID NO: 117, the sequence EDH, SEQ ID NO: 189, respectively; or a heavy chain with three CDRs comprising SEQ ID NOS 10, 46, 82 respectively and a light chain with three CDRs comprising SEQ ID NO: 118, the sequence EDN, SEQ ID NO: 190, respectively; or a heavy chain with three CDRs comprising SEQ ID NOS 11, 47, 83 respectively and a light chain with three CDRs comprising SEQ ID NO: 119, the sequence DNS, SEQ ID NO: 191, respectively; or a heavy chain with three CDRs comprising SEQ ID NOS 12, 48, 84 respectively and a light chain with three CDRs comprising SEQ ID NO: 120, the sequence EDN, SEQ ID NO: 192, respectively; or a heavy chain with three CDRs comprising SEQ ID NO: 13, 49, 85 respectively and a light chain with three CDRs comprising SEQ ID NO: 121, the sequence DDI, SEQ ID NO: 193, respectively; or a heavy chain with three CDRs comprising SEQ ID NOS 14, 50, 86 respectively and a light chain with three CDRs comprising SEQ ID NO: 122, the sequence STN, SEQ ID NO: 194, respectively; or a heavy chain with three CDRs comprising SEQ ID NOS 15, 51, 87 respectively and a light chain with three CDRs comprising SEQ ID NO: 123, RNN, SEQ ID NO: 195, respectively; or a heavy chain with three CDRs comprising SEQ ID NOS 16, 52, 88 respectively and a light chain with three CDRs comprising SEQ ID NO: 124, the sequence WAS, SEQ ID NO: 196, respectively; or a heavy chain with three CDRs comprising SEQ ID NOS 17, 53, 89 respectively and a light chain with three CDRs comprising SEQ ID NO: 125, the sequence WAS, SEQ ID NO: 197, respectively; or a heavy chain with three CDRs comprising SEQ ID NO: 18, 54, 90 respectively and a light chain with three CDRs comprising SEQ ID NO: 126, the sequence RNN, SEQ ID NO: 198, respectively; or a heavy chain with three CDRs comprising SEQ ID NOS 19, 55, 91 respectively and a light chain with three CDRs comprising SEQ ID NO: 127, the sequence SNN, SEQ ID NO: 199, respectively; or a heavy chain with three CDRs comprising SEQ ID NOS 20, 56, 92 respectively and a light chain with three CDRs comprising SEQ ID NO: 128, the sequence GAS, SEQ ID NO: 200, respectively; or a heavy chain with three CDRs comprising the SEQ ID NOS 21, 57, 93 respectively and a light chain with three CDRs comprising SEQ ID NO: 129, the sequence EVS, SEQ ID NO: 201, respectively; or a heavy chain with three CDRs comprising SEQ ID NOS 22, 58, 94 respectively and a light chain with three CDRs comprising SEQ ID NO: 130, KDS, SEQ ID NO: 202, respectively; or a heavy chain with three CDRs comprising SEQ ID NOS 23, 59, 95 respectively and a light chain with three CDRs comprising SEQ ID NO: 131, the sequence RDN, SEQ ID NO: 203, respectively; or a heavy chain with three CDRs comprising SEQ ID NOS 24, 60, 96 respectively and a light chain with three CDRs comprising SEQ ID NO: 132, the sequence RNN, SEQ ID NO: 204, respectively; or a heavy chain with three CDRs comprising SEQ ID NO: 25, 61, 95 respectively and a light chain with three CDRs comprising SEQ ID NO: 133, the sequence EVN, SEQ ID NO: 205, respectively; or a heavy chain with three CDRs comprising SEQ ID NO: 26, 62, 96 respectively and a light chain with three CDRs comprising SEQ ID NO: 134, the sequence GAS, SEQ ID NO: 206, respectively; or a heavy chain with three CDRs comprising SEQ ID NOS 27, 63, 97 respectively and a light chain with three CDRs comprising SEQ ID NO: 135, the sequence NDN, SEQ ID NO: 207, respectively; or a heavy chain with three CDRs comprising SEQ ID NO: 28, 64, 98 respectively and a light chain with three CDRs comprising SEQ ID NO: 136, the sequence SNN, SEQ ID NO: 208, respectively; or a heavy chain with three CDRs comprising SEQ ID NOS 29, 65, 99 respectively and a light chain with three CDRs comprising SEQ ID NO: 137, the sequence SNN, SEQ ID NO: 209, respectively; or a heavy chain with three CDRs comprising SEQ ID NO: 30, 66, 100 respectively and a light chain with three CDRs comprising SEQ ID NO: 138, the sequence KNN, SEQ ID NO: 210, respectively; or a heavy chain with three CDRs comprising SEQ ID NO: 31, 67, 101 respectively and a light chain with three CDRs comprising SEQ ID NO: 139, the sequence DAS, SEQ ID NO: 211, respectively; or a heavy chain with three CDRs comprising SEQ ID NOS 32, 68, 102 respectively and a light chain with three CDRs comprising SEQ ID NO: 140, the sequence KDT, SEQ ID NO: 212, respectively; or a heavy chain with three CDRs comprising SEQ ID NO: 33, 69, 103 respectively and a light chain with three CDRs comprising SEQ ID NO: 141, the sequence EDN, SEQ ID NO: 213, respectively; or a heavy chain with three CDRs comprising SEQ ID NO: 34, 70, 104 respectively and a light chain with three CDRs comprising SEQ ID NOS 142, 178, 214, respectively; or a heavy chain with three CDRs comprising SEQ ID NOS 35, 71, 105 respectively and a light chain with three CDRs comprising SEQ ID NO: 143, the sequence GAS, SEQ ID NO: 215, respectively; or a heavy chain with three CDRs comprising SEQ ID NOS 36, 72, 106 respectively and a light chain with three CDRs comprising SEQ ID NO: 144, the sequence RDD, SEQ ID NO: 216, respectively; or a heavy chain with three CDRs comprising SEQ ID NOS 217, 247, 277 respectively and a light chain with three CDRs comprising SEQ ID NOS 307, the sequence SNN, SEQ ID NO: 367, respectively; or a heavy chain with three CDRs comprising the SEQ ID NOS 218, 248, 278 respectively and a light chain with three CDRs comprising SEQ ID NO: 308, the sequence HDS, SEQ ID NO: 368, respectively; or a heavy chain with three CDRs comprising SEQ ID NOS 219, 249, 279 respectively and a light chain with three CDRs comprising SEQ ID NO: 309, the sequence RNS, SEQ ID NO: 369, respectively; or a heavy chain with three CDRs comprising SEQ ID NOS 220, 250, 280 respectively and a light chain with three CDRs comprising SEQ ID NO: 310, the sequence GAS, SEQ ID NO: 370, respectively; or a heavy chain with three CDRs comprising SEQ ID NOS 221, 251, 281 respectively and a light chain with three CDRs comprising SEQ ID NO: 311, the sequence YDS, SEQ ID NO: 371, respectively; or a heavy chain with three CDRs comprising SEQ ID NOS 222, 252, 282 respectively and a light chain with three CDRs comprising SEQ ID NO: 312, the sequence RNN, SEQ ID NO: 372, respectively; or a heavy chain with three CDRs comprising SEQ ID NOS 223, 253, 283 respectively and a light chain with three CDRs comprising SEQ ID NO: 313, the sequence SLN, SEQ ID NO: 373, respectively; or a heavy chain with three CDRs comprising SEQ ID NOS 224, 254, 284 respectively and a light chain with three CDRs comprising SEQ ID NO: 314, the sequence RNN, SEQ ID NO: 374, respectively; or a heavy chain with three CDRs comprising SEQ ID NOS 225, 255, 285 respectively and a light chain with three CDRs comprising SEQ ID NO: 315, the sequence GRD, SEQ ID NO: 375, respectively; or a heavy chain with three CDRs comprising SEQ ID NOS 226, 256, 286 respectively and a light chain with three CDRs comprising SEQ ID NO: 316, the sequence SNN, SEQ ID NO: 376, respectively; or a heavy chain with three CDRs comprising SEQ ID NOS 227, 257, 287 respectively and a light chain with three CDRs comprising SEQ ID NO: 317, RNS, SEQ ID NO: 377, respectively; or a heavy chain with three CDRs comprising SEQ ID NOS 228, 258, 288 respectively and a light chain with three CDRs comprising SEQ ID NO: 318, the sequence GAT, SEQ ID NO: 378, respectively; or a heavy chain with three CDRs comprising SEQ ID NOS 229, 259, 289 respectively and a light chain with three CDRs comprising SEQ ID NO: 319, the sequence STS, SEQ ID NO: 379, respectively; or a heavy chain with three CDRs comprising SEQ ID NO: 230, 260, 290 respectively and a light chain with three CDRs comprising SEQ ID NO: 320, the sequence GNS, SEQ ID NO: 380, respectively; or a heavy chain with three CDRs comprising SEQ ID NO: 231, 261, 291 respectively and a light chain with three CDRs comprising SEQ ID NO: 321, the sequence EVS, SEQ ID NO: 381, respectively; or a heavy chain with three CDRs comprising SEQ ID NO: 232, 262, 292 respectively and a light chain with three CDRs comprising SEQ ID NO: 322, QST, SEQ ID NO: 382, respectively; or a heavy chain with three CDRs comprising SEQ ID NOS 233, 263, 293 respectively and a light chain with three CDRs comprising SEQ ID NO: 323, the sequence SNN, SEQ ID NO: 383, respectively; or a heavy chain with three CDRs comprising SEQ ID NOS 234, 273, 294 respectively and a light chain with three CDRs comprising SEQ ID NO: 324, the sequence RND, SEQ ID NO: 384, respectively; or a heavy chain with three CDRs comprising SEQ ID NO: 235, 274, 295 respectively and a light chain with three CDRs comprising SEQ ID NO: 325, the sequence WAS, SEQ ID NO: 385, respectively; or a heavy chain with three CDRs comprising SEQ ID NOS 236, 275, 296 respectively and a light chain with three CDRs comprising SEQ ID NO: 326, the sequence NTN, SEQ ID NO: 386, respectively; or a heavy chain with three CDRs comprising SEQ ID NOS 237, 276, 297 respectively and a light chain with three CDRs comprising SEQ ID NO: 327, the sequence RNN, SEQ ID NO: 387, respectively; or a heavy chain with three CDRs comprising SEQ ID NOS 237, 277, 298 respectively and a light chain with three CDRs comprising SEQ ID NO: 328, the sequence YAS, SEQ ID NO: 388, respectively; or a heavy chain with three CDRs comprising SEQ ID NOS 238, 278, 299 respectively and a light chain with three CDRs comprising SEQ ID NO: 329, the sequence NTN, SEQ ID NO: 389, respectively; or a heavy chain with three CDRs comprising SEQ ID NOS 239, 279, 300 respectively and a light chain with three CDRs comprising SEQ ID NO: 330, the sequence YDD, SEQ ID NO: 390, respectively; or a heavy chain with three CDRs comprising SEQ ID NOS 240, 280, 301 respectively and a light chain with three CDRs comprising SEQ ID NO: 331, the sequence EDH, SEQ ID NO: 391, respectively; or a heavy chain with three CDRs comprising SEQ ID NOS 241, 281, 302 respectively and a light chain with three CDRs comprising SEQ ID NO: 332, the sequence DNS, SEQ ID NO: 392, respectively; or a heavy chain with three CDRs comprising SEQ ID NOS 242, 282, 303 respectively and a light chain with three CDRs comprising SEQ ID NO: 333, the sequence RNN, SEQ ID NO: 393, respectively; or a heavy chain with three CDRs comprising SEQ ID NOS 243, 283, 304 respectively and a light chain with three CDRs comprising SEQ ID NO: 334, the sequence WAS, SEQ ID NO: 394, respectively; or a heavy chain with three CDRs comprising SEQ ID NOS 244, 284, 305 respectively and a light chain with three CDRs comprising SEQ ID NO: 335, the sequence SNN, SEQ ID NO: 395, respectively; or a heavy chain with three CDRs comprising SEQ ID NOS 245, 285, 306 respectively and a light chain with three CDRs comprising SEQ ID NO: 336, the sequence SNN, SEQ ID NO: 396, respectively.

[0092] Other anti-influenza antibodies include those having the amino acid or nucleic acid sequences shown in the below Table 1.

TABLE 1A
Antibody 3I14Variable Region nucleic acid sequences

V_{H} chain of 3I14 (SEQ ID NO: 1665)
CAGGTGCAGCTGTTGGAGTCTGGGGGAGGCGTGGTCCAGCCTGGGAGGTCCCTGAGACTCTCCTGT
GCAGCCTCTGGATTCACCTTCAGTAACTATGGCATGCACTGGGTCCGCCAGGCTCCAGGCAAGGGG
CTGGAGTGGGTGGCAATTATATCATTTGATGGAAGTAAAAAATATTATGCAAACTCCGTGAAGGGC
CGATCCACCATCTCCAGAGACAATTCCAAGAACACGCTGTCTCTGCAAATGAACAGCCTGGGACCT
GAGGACACGGCTCTATATTACTGTGCGAAACTGCCCTCCCCGTATTACTTTGATAGTCGGTTCGTG
TGGGTCGCCGCCAGCGCATTTCACTTCTGGGGCCAGGGAATCCTGGTCACCGTCTCTTCA
V_{L} chain of 3I14 (SEQ ID NO: 1667)
AATTTTATGCTGACTCAGCCACCCTCAGCGTCTGGGACCCCCGGGCAGAGGGTCACCATCTCTTGC
TCTGGAAGCAGCTCCAACATCGGAGGTAATACTGTACACTGGTTCCAGCAGCTCCCAGGAACGGCC
CCCAAACTCCTCATCTATACTAATAGTCTGCGGCCCTCAGGGGTCCCTGACCGATTCTCTGGCTCC
AAGTCTGGCACCTCAGCCTCCCTGGCCATCAGTGGGCTCCAGTCTGAGGATGAGGCTGATTATTAC
TGTGCAGCATGGGATGACAGCCTAAATGGTCAGGTGTTCGGCGGAGGGACCAAGCTGACCGTCCTA

TABLE 1B
Antibody 3I14Variable Region amino acid sequences

V_{H} chain of 3I14 (SEQ ID NO: 1666)
QVQLLESGGGVVQPGRSLRLSCAASGFTFSNYGMHWVRQAPGKGLEWVAIISFDGSKKYY
ANSVKGRSTISRDNSKNTLSLQMNSLGPEDTALYYCAKLPSPYYFDSRFVWVAASAFHFW
GQGIL VTVSS
V_{L} chain of 3I14 (SEQ ID NO: 1668)
NFMLTQPPSASGTPGQRVTISCSGSSSNIGGNTVHWFQQLPGTAPKLLIYTNSLRPSGVPD
RFSGSKSGTSASLAISGLQSEDEADYYCAAWDDSLNGQVFGGGTKLTVL

TABLE 1C
Antibody 3I14V_{L}D94N Variable Region nucleic acid sequence

V_{L} chain of 3I14V_{L}D94N (SEQ ID NO: 1669)
AATTTTATGCTGACTCAGCCACCCTCAGCGTCTGGGACCCCCGGGCAGAGGGTCACCATCTCTTGC
TCTGGAAGCAGCTCCAACATCGGAGGTAATACTGTACACTGGTTCCAGCAGCTCCCAGGAACGGCC
CCCAAACTCCTCATCTATACTAATAGTCTGCGGCCCTCAGGGGTCCCTGACCGATTCTCTGGCTCC
AAGTCTGGCACCTCAGCCTCCCTGGCCATCAGTGGGCTCCAGTCTGAGGATGAGGCTGATTATTAC
TGTGCAGCATGGGATAACAGCCTAAATGGTCAGGTGTTCGGCGGAGGGACCAAGCTGACCGTCCTA

TABLE 1C
Antibody 3I14V_{L}D94N Variable Region amino acid sequence

V_{L} chain of 3114V_{L}D94N (SEQ ID NO: 1670)
NFMLTQPPSASGTPGQRVTISCSGSSSNIGGNTVHWFQQLPGTAPKLLIYTNSLRPSGVPD
RFSGSKSGTSASLAISGLQSEDEADYYCAAWDNSLNGQVFGGGTKLTVL

[0093] The amino acid sequences of the heavy and light chain complementary determining regions of the 3I14 and 3I14V_{L}D94N neutralizing influenza antibodies are shown in the below Table 2

TABLE 2

| | | |
|---|---|---|
| HCDR1 | GFTFSNYG | (SEQ ID NO: 1671) |
| HCDR2 | ISFDGSKK | (SEQ ID NO: 1672) |
| HCDR3 | CAKLPSPYYFDSR | (SEQ ID NO: 1673) |
| | FVWVAASAFHFW | |
| LCDR1 | SSNIGGNT | (SEQ ID NO: 1674) |
| LCDR2 | TNS | (SEQ ID NO: 1675) |
| LCDR3 | CAAWDDSLNGQVF | (SEQ ID NO: 1676) |
| 3I14V_{L}D94N | CAAWDNSLNGQVF | (SEQ ID NO: 1677) |
| LCDR3 | | |

### CC-Chemokine Receptor 4 CCR4 (94)

[0094] Exemplary anti-CCR4 antibodies include antibodies having a VH nucleotide sequence having SEQ ID NO: 1678 and a VL nucleotide sequence having SEQ ID NO: 1679; or a VH nucleotide sequence having SEQ ID NO: 1680 and a VL nucleotide sequence having SEQ ID NO: 1681; or a VH nucleotide sequence having SEQ ID NO: 1682 and a VL nucleotide sequence having SEQ ID NO: 1683; or a VH nucleotide sequence having SEQ ID NO: 1684 and a VL nucleotide sequence having SEQ ID NO: 1685; or a VH nucleotide sequence having SEQ ID NO: 1686 and a VL nucleotide sequence having SEQ ID NO: 1687; or a VH nucleotide sequence having SEQ ID NO: 1688 and a VL nucleotide sequence having SEQ ID NO: 1689.

[0095] Exemplary anti-CCR4 antibodies include antibodies having a VH amino acid sequence having SEQ ID NO: 1690 and a VL amino acid sequence having SEQ ID NO: 1691; or a VH amino acid sequence having SEQ ID NO: 1692 and a VL amino acid sequence having SEQ ID NO: 1693; or a VH amino acid sequence having SEQ ID NO: 1694 and a VL amino acid sequence having SEQ ID NO: 1695; or a VH amino acid sequence having SEQ ID NO: 1696 and a VL amino acid sequence having SEQ ID NO: 1697; or a VH amino acid sequence having SEQ ID NO: 1698 and a VL amino acid sequence having SEQ ID NO: 1699; or a VH amino acid sequence having SEQ ID NO: 1700 and a VL amino acid sequence having SEQ ID NO: 1701.

[0096] In other embodiments the anti-influenza antibodies have a heavy chain with three CDRs having the amino acid sequences of SEQ ID NO: 1702, 1703, 1704, respectively, and a light chain with three CDRs having the amino acid sequences of SEQ ID NO: 1705, 1706, 1707, respectively; or a heavy chain with three CDRs having the amino acid sequences of SEQ ID NO: 1708, 1709, 1710, respectively, and a light chain with three CDRs having the amino acid sequences of SEQ ID NO: 1711, 1712, 1713, respectively; or a heavy chain with three CDRs having the amino acid sequences of SEQ ID NO: 1714, 1715, 1716, respectively, and a light chain with three CDRs having the amino acid sequences of SEQ ID NO: 1717, 1718, 1719, respectively; or a heavy chain with three CDRs having the amino acid sequences of SEQ ID NO: 1720, 1721, 1722, respectively, and a light chain with three CDRs having the amino acid sequences of SEQ ID NO: 1723, 1724, 1725, respectively; or a heavy chain with three CDRs having the amino acid sequences of SEQ ID NO: 1726, 1727, 1728, respectively, and a light chain with three CDRs having the amino acid sequences of SEQ ID NO: 1729, 1730, 1731, respectively; or a heavy chain with three CDRs having the amino acid sequences of SEQ ID NO: 1732, 1733, 1734, respectively, and a light chain with three CDRs having the amino acid sequences of SEQ ID NO: 1735, 1736, 1737, respectively; or a heavy chain with three CDRs having the amino acid sequences of SEQ ID NO: 1738, 1739, 1740, respectively, and a light chain with three CDRs having the amino acid sequences of SEQ ID NO: 1741, 1742, 1743, respectively.

### Human Immunoglobulin Heavy Chain Variable Region Germline Gene (VH1-69) (133)

[0097] Exemplary anti-human immunoglobulin heavy chain variable region germline gene VH1-69 antibodies include a VH nucleotide sequence having SEQ ID NO: 1744 and a VL nucleotide sequence having SEQ ID NO: 1745; or a VH nucleotide sequence having SEQ ID NO: 1748 and a VL nucleotide sequence having SEQ ID NO: 1749; or a VH nucleotide sequence having SEQ ID NO: 1752 and a VL nucleotide sequence having SEQ ID NO: 1753.

[0098] Exemplary anti-human immunoglobulin heavy chain variable region germline gene VH1-69 antibodies include a VH amino acid sequence having SEQ ID NO: 1746 and a VL amino acid sequence having SEQ ID NO: 1747; or a VH amino acid sequence having SEQ ID NO: 1750 and a VL amino acid sequence having SEQ ID NO: 1751; or a VH amino acid sequence having SEQ ID NO: 1754 and a VL amino acid sequence having SEQ ID NO: 1755.

[0099] In other embodiments the anti-human immunoglobulin heavy chain variable region germline gene VH1-69 antibodies have a heavy chain with three CDRs having the amino acid sequences of SEQ ID NO: 1756, 1757, 1758, respectively, and a light chain with three CDRs having the amino acid sequences of SEQ ID NO: 1759, 1760, 1761, respectively.

### Zika Virus Antibodies (140)

[0100] Exemplary antibodies that target and neutralize zika virus include antibodies having a VH nucleotide sequence having SEQ ID NO: 1762 and a VL nucleotide sequence having SEQ ID NO: 1763.

[0101] Exemplary antibodies that target and neutralize zika virus include antibodies having a VH amino acid sequence having SEQ ID NO: 1764 and a VL amino acid sequence having SEQ ID NO: 1765.

[0102] In other embodiments, the antibodies that target and neutralize zika virus have a heavy chain with three CDRs having the amino acid sequences of SEQ ID NO: 1766, 1767, 1768, respectively, and a light chain with three CDRs having the amino acid sequences of SEQ ID NO: 1769, 1770, 1771, respectively.

### Glucocorticoid-Induced Tumor Necrosis Factor Receptor (GITR) (141)

[0103] Exemplary anti-glucocorticoid-induced tumor necrosis factor receptor (GITR) antibodies include a VH nucleotide sequence having SEQ ID NO: 1772 and a VL nucleotide sequence having SEQ ID NO: 1773; or a VH nucleotide sequence having SEQ ID NO: 1774 and a VL nucleotide sequence having SEQ ID NO: 1775; or a VH nucleotide sequence having SEQ ID NO: 1776 and a VL nucleotide sequence having SEQ ID NO: 1777; or a VH nucleotide sequence having SEQ ID NO: 1778 and a VL nucleotide sequence having SEQ ID NO: 1779; or a VH nucleotide sequence having SEQ ID NO: 1780 and a VL nucleotide sequence having SEQ ID NO: 1781; or a VH nucleotide sequence having SEQ ID NO: 1782 and a VL nucleotide sequence having SEQ ID NO: 1783; or a VH nucleotide sequence having SEQ ID NO: 1784 and a VL nucleotide sequence having SEQ ID NO: 1785; or a VH nucleotide sequence having SEQ ID NO: 1786 and a VL nucleotide sequence having SEQ ID NO: 1787; or a VH nucleotide sequence having SEQ ID NO: 1788 and a VL nucleotide sequence having SEQ ID NO: 1789; or a VH nucleotide sequence having SEQ ID NO: 1790 and a VL nucleotide sequence having SEQ ID NO: 1791; or a VH nucleotide sequence having SEQ ID NO: 1792 and a VL nucleotide sequence having SEQ ID NO: 1793; or a VH nucleotide sequence having SEQ ID NO: 1794 and a VL nucleotide sequence having SEQ ID NO: 1795; or a VH nucleotide sequence having SEQ ID NO: 1796 and a VL nucleotide sequence having SEQ ID NO: 1797.

[0104] Exemplary anti-glucocorticoid-induced tumor necrosis factor receptor (GITR) antibodies include a VH amino acid sequence having SEQ ID NO: 1798 and a VL amino acid sequence having SEQ ID NO: 1799; or a VH amino acid sequence having SEQ ID NO: 1800 and a VL amino acid sequence having SEQ ID NO: 1801; or a VH amino acid sequence having SEQ ID NO: 1802 and a VL amino acid sequence having SEQ ID NO: 1803; or a VH amino acid sequence having SEQ ID NO: 1804 and a VL amino acid sequence having SEQ ID NO: 1805; or a VH amino acid sequence having SEQ ID NO: 1806 and a VL amino acid sequence having SEQ ID NO: 1807; or a VH amino acid sequence having SEQ ID NO: 1808 and a VL amino acid sequence having SEQ ID NO: 1809; or a VH amino acid sequence having SEQ ID NO: 1810 and a VL amino acid sequence having SEQ ID NO: 1811; or a VH amino acid sequence having SEQ ID NO: 1812 and a VL amino acid sequence having SEQ ID NO: 1813; or a VH amino acid sequence having SEQ ID NO: 1814 and a VL amino acid sequence having SEQ ID NO: 1815; or a VH amino acid sequence having SEQ ID NO: 1816 and a VL amino acid sequence having SEQ ID NO: 1817; or a VH amino acid sequence having SEQ ID NO: 1818 and a VL amino acid sequence having SEQ ID NO: 1819; or a VH amino acid sequence having SEQ ID NO: 1820 and a VL amino acid sequence having SEQ ID NO: 1821; or a VH amino acid sequence having SEQ ID NO: 1822 and a VL amino acid sequence having SEQ ID NO: 1823.

[0105] In other embodiments, anti-glucocorticoid-induced tumor necrosis factor receptor (GITR) antibodies have a heavy chain with three CDRs having the amino acid sequences of SEQ ID NO: 1824, 1825, 1826, respectively, and a light chain with three CDRs having the amino acid sequences of SEQ ID NO: 1827, 1828, 1829, respectively; or a heavy chain with three CDRs having the amino acid sequences of SEQ ID NO: 1830, 1831, 1832, respectively, and a light chain with three CDRs having the amino acid sequences of SEQ ID NO: 1833, 1834, 1835, respectively; or a heavy chain with three CDRs having the amino acid sequences of SEQ ID NO: 1836, 1837, 1838, respectively, and a light chain with three CDRs having the amino acid sequences of SEQ ID NO: 1839, 1840, 1841, respectively; or a heavy chain with three CDRs having the amino acid sequences of SEQ ID NO: 1842, 1843, 1844, respectively, and a light chain with three CDRs having the amino acid sequences of SEQ ID NO: 1845, 1846, 1847, respectively; or a heavy chain with three CDRs having the amino acid sequences of SEQ ID NO: 1848, 1849, 1850, respectively, and a light chain with three CDRs having the amino acid sequences of SEQ ID NO: 1851, 1852, 1853, respectively; or a heavy chain with three CDRs having the amino acid sequences of SEQ ID NO: 1854, 1855, 1856, respectively, and a light chain with three CDRs having the amino acid sequences of SEQ ID NO: 1857, 1858, 1859, respectively; or a heavy chain with three CDRs having the amino acid sequences of SEQ ID NO: 1860, 1861, 1862, respectively, and a light chain with three CDRs having the amino acid sequences of SEQ ID NO: 1863, 1864, 1865, respectively; or a heavy chain with three CDRs having the amino acid sequences of SEQ ID NO: 1866, 1867, 1868, respectively, and a light chain with three CDRs having the amino acid sequences of SEQ ID NO: 1869, 1870, 1871, respectively; or a heavy chain with three CDRs having the amino acid sequences of SEQ ID NO: 1872, 1873, 1874, respectively, and a light chain with three CDRs having the amino acid sequences of SEQ ID NO: 1875, 1876, 1877, respectively; or a heavy chain with three CDRs having the amino acid sequences of SEQ ID NO: 1878, 1879, 1880, respectively, and a light chain with three CDRs having the amino acid sequences of SEQ ID NO: 1881, 1882, 1883, respectively; or a heavy chain with three CDRs having the amino acid sequences of SEQ ID NO: 1884, 1885, 1886, respectively, and a light chain with three CDRs having the amino acid sequences of SEQ ID NO: 1887, 1888, 1889, respectively; or a heavy chain with three CDRs having the amino acid sequences of SEQ ID NO: 1890, 1891, 1892, respectively, and a light chain with three CDRs having the amino acid sequences of SEQ ID NO: 1893, 1894, 1895, respectively; or a heavy chain with three CDRs having the amino acid sequences of SEQ ID NO: 1896, 1897, 1898, respectively, and a light chain with three CDRs having the amino acid sequences of SEQ ID NO: 1899, 1900, 1901.

[0106] The tetravalent antibody is a dimer of a bispecific scFv fragment having a first binding site for a first antigen, a second binding site for a second antigen. The scFv is preferably a tandem scFv. The variable domains of the two binding sites are joined together via a linker domain. In preferred embodiments the linker domain includes an immunoglobulin hinge region amino acid sequence. The hinge region is an IgG1, an IgG2, an IgG3, or an IgG4 hinge region. Exemplary hinge region amino acids sequences include EPKSCDKTHTCPPCP (SEQ ID NO:1902); ERKCCVECPPCP (SEQ ID NO:1903); and ESKYGPPCPSCP (SEQ ID NO:1904).

[0107] In some embodiments the linker domain further includes at least a portion of an immunoglobulin Fc domain. The at least a portion of an immunoglobulin Fc domain is an IgG1, an IgG2, an IgG3, or an IgG4 Fc domain. The at least a portion of an immunoglobulin Fc domain is linked to the C-terminus of the hinge region. By at least a portion of an immunoglobulin Fc domain is meant for example, an immunoglobulin CH2 domain amino acid sequence, CH3 domain amino acid sequence, CH4 domain amino acid sequence or any combination thereof.

[0108] Inclusion of at least a portion of an immunoglobulin Fc domain (e.g. CH2 domain) provides a third functional binding site (i.e. Fc effector function) resulting in a trifunctional bispecific antibody. Accordingly, it can be desirable to modify the at least a portion of with respect to effector function, so as to enhance, e.g., the effectiveness of the tBsAb. For example, amino acids substitution, insertion or deletion can be introduced into the at least a portion of the immunoglobulin Fc domain to generate tBsAbs having improved internalization capability and/or increased complement mediated cell killing and antibody dependent cellular cytotoxicity (ADCC). Alternatively, the at least a portion of the immunoglobulin Fc domain is glycosylated as to improve the stability and solubility of the tBsAbs. For example, the at least a portion of the immunoglobulin Fc domain is glycosylated at the amino acid corresponding to asparagine at amino acid position 297. While glycosylation is important for stability defucosylation of the CH2 carbohydrate can also increase the binding affinity to FcγRs and lead to further enhancement of ADCC.

[0109] In certain embodiments, the tBsAbs of the invention may comprise an Fc variant comprising an amino acid substitution which alters the antigen-independent effector functions of the antibody, in particular the circulating half-life of the antibody. Such antibodies exhibit either increased or decreased binding to FcRn when compared to antibodies lacking these substitutions, therefore, have an increased or decreased half-life in serum, respectively. Fc variants with improved affinity for FcRn are anticipated to have longer serum half-lives, and such molecules have useful applications in methods of treating mammals where long half-life of the administered antibody is desired, e.g., to treat a chronic disease or disorder. In contrast, Fc variants with decreased FcRn binding affinity are expected to have shorter half-lives, and such molecules are also useful, for example, for administration to a mammal where a shortened circulation time may be advantageous, e.g. for in vivo diagnostic imaging or in situations where the starting antibody has toxic side effects when present in the circulation for prolonged periods. In one embodiment, an Fc domain having one or more amino acid substitutions within the “FcRn binding loop” of an Fc domain. The FcRn binding loop is comprised of amino acid residues 280-299 (according to EU numbering). Exemplary amino acid substitutions which altered FcRn binding activity are disclosed in International PCT Publication No. WO05/047327 which is incorporated by reference herein. In certain exemplary embodiments, the antibodies, or fragments thereof, of the invention comprise an Fc domain having one or more of the following substitutions: V284E, H285E, N286D, K290E and S304D (EU numbering).

[0110] Preferably the at least a portion of the Fc domain is a CH2 domain amino acid sequence. An exemplary CH2 domain amino acid sequence includes APELLGGPDVFLF (SEQ ID NO: 1905).

[0111] In other aspects the immunoglobulin hinge region amino acid sequence or the immunoglobulin hinge region/Fc domain amino acid sequence is flanked by a flexible linker amino acid sequence. Flexible linker amino acid sequences include for example is (GGGS)_{X=1-6} (SEQ ID NO: 1906), (GGGGS)_{X=1-6} (SEQ ID NO: 1907), or GSAGSAAGSGEF (SEQ ID NO: 1908).

[0112] Increasing the linker by adding multiple repeats (e.g., four or more) will predominantly result in a monomeric scFv, thus it can increase the accessibility to an epitope. Length and composition of the linkers can be chosen to optimize the stability and functional activity and takes into account the topography of the epitope on the target protein.

[0113] Also included in the invention is a nucleic acid construct including nucleic acids molecules encoding: a light chain and a heavy chain variable region of an antibody specifically binding to a first antigen; a light chain and heavy chain variable region of an antibody specifically binding to a second antigen; and a linker domain.

[0114] In yet a further aspect the invention provides a genetically engineered cell which expresses and bears on the cell surface membrane tBsAbs of the invention. The cell is a T-cell, a B-cell, a follicular T-Cell or an NK cell. The T cell is CD4+ or CD8+. The cell is a mixed population of CD4+ and CD8 cells+. The cell is further engineered to express and secrete the tBsAb.

[0115] Vectors including the nucleic acid constructs according to the invention and host cell, e.g., a mammalian cell, expressing the vectors of the invention.

### Chimeric Antigen Receptors

[0116] The tBsAb of the invention can be used to produce a chimeric antigen receptor (CAR). The CAR generally comprises at least one transmembrane polypeptide comprising at least one extracellular ligand-binding domain comprising the tBsAb of the invention and; one transmembrane polypeptide comprising at least one intracellular signaling domain.

[0117] In a preferred embodiment said transmembrane domain further comprises a stalk region between said extracellular ligand-binding domain and said transmembrane domain. The term “stalk region” used herein generally means any oligo- or polypeptide that functions to link the transmembrane domain to the extracellular ligand-binding domain. In particular, stalk region are used to provide more flexibility and accessibility for the extracellular ligand-binding domain. A stalk region may comprise up to 300 amino acids, preferably 10 to 100 amino acids and most preferably 25 to 50 amino acids. Stalk region may be derived from all or part of naturally occurring molecules, such as from all or part of the extracellular region of CD8, CD4 or CD28, or from all or part of an antibody constant region. Alternatively the stalk region may be a synthetic sequence that corresponds to a naturally occurring stalk sequence, or may be an entirely synthetic stalk sequence. In a preferred embodiment said stalk region is a part of human CD8 alpha chain

[0118] The signal transducing domain or intracellular signaling domain of the CAR of the invention is responsible for intracellular signaling following the binding of extracellular ligand binding domain to the target resulting in the activation of the immune cell and immune response. In other words, the signal transducing domain is responsible for the activation of at least one of the normal effector functions of the immune cell in which the CAR is expressed. For example, the effector function of a T cell can be a cytolytic activity or helper activity including the secretion of cytokines. Thus, the term “signal transducing domain” refers to the portion of a protein which transduces the effector signal function signal and directs the cell to perform a specialized function.

[0119] Signal transduction domain comprises two distinct classes of cytoplasmic signaling sequence, those that initiate antigen-dependent primary activation, and those that act in an antigen-independent manner to provide a secondary or co-stimulatory signal. Primary cytoplasmic signaling sequence can comprise signaling motifs which are known as immunoreceptor tyrosine-based activation motifs of ITAMs. ITAMs are well defined signaling motifs found in the intracytoplasmic tail of a variety of receptors that serve as binding sites for syk/zap70 class tyrosine kinases. Examples of ITAM used in the invention can include as non limiting examples those derived from TCR zeta, FcR gamma, FcR beta, FcR epsilon, CD3 gamma, CD3 delta, CD3 epsilon, CD5, CD22, CD79a, CD79b and CD66d. In a preferred embodiment, the signaling transducing domain of the CAR can comprise the CD3 zeta signaling domain, or the intracytoplasmic domain of the Fc epsilon RI beta or gamma chains. In another preferred embodiment, the signaling is provided by CD3 zeta together with co-stimulation provided by CD28 and/or a tumor necrosis factor receptor (TNFr), such as 4-1BB or OX40), for example.

[0120] In particular embodiment the intracellular signaling domain of the CAR of the present invention comprises a co-stimulatory signal molecule. In some embodiments the intracellular signaling domain contains 2, 3, 4 or more co-stimulatory molecules in tandem. A co-stimulatory molecule is a cell surface molecule other than an antigen receptor or their ligands that is required for an efficient immune response.

[0121] “Co-stimulatory ligand” refers to a molecule on an antigen presenting cell that specifically binds a cognate co-stimulatory molecule on a T-cell, thereby providing a signal which, in addition to the primary signal provided by, for instance, binding of a TCR/CD3 complex with an MHC molecule loaded with peptide, mediates a T cell response, including, but not limited to, proliferation activation, differentiation and the like. A co-stimulatory ligand can include but is not limited to CD7, B7-1 (CD80), B7-2 (CD86), PD-L1, PD-L2, 4-1BBL, OX40L, inducible costimulatory ligand (ICOS-L), intercellular adhesion molecule (ICAM, CD30L, CD40, CD70, CD83, HLA-G, MICA, MICB, HVEM, lymphotoxin beta receptor, 3/TR6, ILT3, ILT4, an agonist or antibody that binds Toll ligand receptor and a ligand that specifically binds with B7-H3. A co-stimulatory ligand also encompasses, inter alia, an antibody that specifically binds with a co-stimulatory molecule present on a T cell, such as but not limited to, CD27, CD28, 4-IBB, OX40, CD30, CD40, PD-1, ICOS, lymphocyte function-associated antigen-1 (LFA-1), CD2, CD7, LTGHT, NKG2C, B7-H3, a ligand that specifically binds with CD83.

[0122] A “co-stimulatory molecule” refers to the cognate binding partner on a T-cell that specifically binds with a co-stimulatory ligand, thereby mediating a co-stimulatory response by the cell, such as, but not limited to proliferation. Co-stimulatory molecules include, but are not limited to an MHC class 1 molecule, BTLA and Toll ligand receptor. Examples of costimulatory molecules include CD27, CD28, CD8, 4-1BB (CD137), OX40, CD30, CD40, PD-1, ICOS, lymphocyte function-associated antigen-1 (LFA-1), CD2, CD7, LIGHT, NKG2C, B7-H3 and a ligand that specifically binds with CD83 and the like. The In another particular embodiment, said signal transducing domain is a TNFR-associated Factor 2 (TRAF2) binding motifs, intracytoplasmic tail of costimulatory TNFR member family. Cytoplasmic tail of costimulatory TNFR family member contains TRAF2 binding motifs consisting of the major conserved motif (P/S/A)X(Q/E)E) or the minor motif (PXQXXD), wherein X is any amino acid. TRAF proteins are recruited to the intracellular tails of many TNFRs in response to receptor trimerization.

[0123] The distinguishing features of appropriate transmembrane polypeptides comprise the ability to be expressed at the surface of an immune cell, in particular lymphocyte cells or Natural killer (NK) cells, and to interact together for directing cellular response of immune cell against a predefined target cell. The different transmembrane polypeptides of the CAR of the present invention comprising an extracellular ligand-biding domain and/or a signal transducing domain interact together to take part in signal transduction following the binding with a target ligand and induce an immune response. The transmembrane domain can be derived either from a natural or from a synthetic source. The transmembrane domain can be derived from any membrane-bound or transmembrane protein although certain transmembrane domains that that best accommodate the chimeras are preferred, e.g., those that promote self-aggregation or promote an increase in CART cell basal activation in the absence of target binding, which could lead to premature exhaustion.

[0124] The term “a part of” used herein refers to any subset of the molecule, that is a shorter peptide. Alternatively, amino acid sequence functional variants of the polypeptide can be prepared by mutations in the DNA which encodes the polypeptide. Such variants or functional variants include, for example, deletions from, or insertions or substitutions of, residues within the amino acid sequence. Any combination of deletion, insertion, and substitution may also be made to arrive at the final construct, provided that the final construct possesses the desired activity, especially to exhibit a specific anti-target cellular immune activity. The functionality of the CAR of the invention within a host cell is detectable in an assay suitable for demonstrating the signaling potential of said CAR upon binding of a particular target. Such assays are available to the skilled person in the art. For example, this assay allows the detection of a signaling pathway, triggered upon binding of the target, such as an assay involving measurement of the increase of calcium ion release, intracellular tyrosine phosphorylation, inositol phosphate turnover, or interleukin (IL) 2, interferon .gamma., GM-CSF, IL-3, IL-4 production thus effected.

### Methods of Use

[0125] The tBsAbs, the cells expressing the tBsAbs or the CARs according to the invention can be used for treating cancer, viral infections or autoimmune disorders in a patient in need thereof. In another embodiment, tBsAbs, the cells expressing the tBsAbs or the CARs according to the invention can be used in the manufacture of a medicament for treatment of a cancer, viral infections of autoimmune disorders, in a patient in need thereof.

[0126] Said treatment can be ameliorating, curative or prophylactic. It may be either part of an autologous immunotherapy or part of an allogenic immunotherapy treatment. By autologous, it is meant that cells, cell line or population of cells used for producing the tBsAbs or the cells expressing the tBsAbs are originating from the patient or from a Human Leucocyte Antigen (HLA) compatible donor. By allogeneic is meant that the cells or population of cells used for producing the tBsAbs or the cells expressing the tBsAbs are not originating from the patient but from a donor.

[0127] Treatment can be used to treat patients diagnosed with cancer, viral infection, autoimmune disorders or Graft versus Host Disease (GvHD). Cancers that may be treated include tumors that are not vascularized, or not yet substantially vascularized, as well as vascularized tumors. The cancers may comprise nonsolid tumors (such as hematological tumors, for example, leukemias and lymphomas) or may comprise solid tumors. Types of cancers to be treated with the CARs of the invention include, but are not limited to, carcinoma, blastoma, and sarcoma, and certain leukemia or lymphoid malignancies, benign and malignant tumors, and malignancies e.g., sarcomas, carcinomas, and melanomas. Adult tumors/cancers and pediatric tumors/cancers are also included.

[0128] It can be a treatment in combination with one or more therapies against cancer selected from the group of antibodies therapy, chemotherapy, cytokines therapy, dendritic cell therapy, gene therapy, hormone therapy, laser light therapy and radiation therapy.

[0129] In a further embodiment, the compositions of the present invention are administered to a patient in conjunction with (e.g., before, simultaneously or following) bone marrow transplantation, T cell ablative therapy using either chemotherapy agents such as, fludarabine, external-beam radiation therapy (XRT), cyclophosphamide, or antibodies such as OKT3 or CAM PATH.

### Definitions

[0130] It is to be noted that the term “a” or “an” entity refers to one or more of that entity: for example, “a bispecific antibody,” is understood to represent one or more bispecific antibodies. As such, the terms “a” (or “an”), “one or more,” and “at least one” can be used interchangeably herein.

[0131] As used herein, the term “polypeptide” is intended to encompass a singular “polypeptide” as well as plural “polypeptides,” and refers to a molecule composed of monomers (amino acids) linearly linked by amide bonds (also known as peptide bonds). The term “polypeptide” refers to any chain or chains of two or more amino acids, and does not refer to a specific length of the product. Thus, peptides, dipeptides, tripeptides, oligopeptides, “protein,” “amino acid chain,” or any other term used to refer to a chain or chains of two or more amino acids, are included within the definition of “polypeptide,” and the term “polypeptide” may be used instead of, or interchangeably with any of these terms. The term “polypeptide” is also intended to refer to the products of post-expression modifications of the polypeptide, including without limitation glycosylation, acetylation, phosphorylation, amidation, derivatization by known protecting/blocking groups, proteolytic cleavage, or modification by non-naturally occurring amino acids. A polypeptide may be derived from a natural biological source or produced by recombinant technology, but is not necessarily translated from a designated nucleic acid sequence. It may be generated in any manner, including by chemical synthesis.

[0132] The term “isolated” as used herein with respect to cells, nucleic acids, such as DNA or RNA, refers to molecules separated from other DNAs or RNAs, respectively, that are present in the natural source of the macromolecule. The term “isolated” as used herein also refers to a nucleic acid or peptide that is substantially free of cellular material, viral material, or culture medium when produced by recombinant DNA techniques, or chemical precursors or other chemicals when chemically synthesized. Moreover, an “isolated nucleic acid” is meant to include nucleic acid fragments which are not naturally occurring as fragments and would not be found in the natural state. The term “isolated” is also used herein to refer to cells or polypeptides which are isolated from other cellular proteins or tissues. Isolated polypeptide is meant to encompass both purified and recombinant polypeptides.

[0133] As used herein, the term “recombinant” as it pertains to polypeptides or polynucleotides intends a form of the polypeptide or polynucleotide that does not exist naturally, a non-limiting example of which can be created by combining polynucleotides or polypeptides that would not normally occur together.

[0134] “Homology” or “identity” or “similarity” refers to sequence similarity between two peptides or between two nucleic acid molecules. Homology can be determined by comparing a position in each sequence which may be aligned for purposes of comparison. When a position in the compared sequence is occupied by the same base or amino acid, then the molecules are homologous at that position. A degree of homology between sequences is a function of the number of matching or homologous positions shared by the sequences. An “unrelated” or “non-homologous” sequence shares less than 40% identity, though preferably less than 25% identity, with one of the sequences of the present disclosure.

[0135] A polynucleotide or polynucleotide region (or a polypeptide or polypeptide region) has a certain percentage (for example, 60%, 65%, 70%, 75%, 80%, 85%, 90%, 95%, 98% or 99%) of “sequence identity” to another sequence means that, when aligned, that percentage of bases (or amino acids) are the same in comparing the two sequences. This alignment and the percent homology or sequence identity can be determined using software programs known in the art, for example those described in Ausubel et al. eds. (2007) Current Protocols in Molecular Biology. Preferably, default parameters are used for alignment. One alignment program is BLAST, using default parameters. In particular, programs are BLASTN and BLASTP, using the following default parameters: Genetic code=standard; filter=none; strand=both; cutoff=60; expect=10; Matrix=BLOSUM62; Descriptions=50 sequences; sort by=HIGH SCORE; Databases=non-redundant, GenBank+EMBL+DDBJ+PDB+GenBank CDS translations+SwissProtein+SPupdate+PIR. Details of these programs can be found at the World Wide Web (www) ncbi.nlm.nih.gov/blast/Blast.cgi, last accessed on May 21, 2008. Biologically equivalent polynucleotides are those having the above-noted specified percent homology and encoding a polypeptide having the same or similar biological activity.

[0136] The term “an equivalent nucleic acid or polynucleotide” refers to a nucleic acid having a nucleotide sequence having a certain degree of homology, or sequence identity, with the nucleotide sequence of the nucleic acid or complement thereof. A homolog of a double stranded nucleic acid is intended to include nucleic acids having a nucleotide sequence which has a certain degree of homology with or with the complement thereof. In one aspect, homologs of nucleic acids are capable of hybridizing to the nucleic acid or complement thereof. Likewise, “an equivalent polypeptide” refers to a polypeptide having a certain degree of homology, or sequence identity, with the amino acid sequence of a reference polypeptide. In some aspects, the sequence identity is at least about 70%, 75%, 80%, 85%, 90%, 95%, 98%, or 99%. In some aspects, the equivalent sequence retains the activity (e.g., epitope-binding) or structure (e.g., salt-bridge) of the reference sequence.

[0137] Hybridization reactions can be performed under conditions of different “stringency”. In general, a low stringency hybridization reaction is carried out at about 40° C. in about 10×SSC or a solution of equivalent ionic strength/temperature. A moderate stringency hybridization is typically performed at about 50° C. in about 6×SSC, and a high stringency hybridization reaction is generally performed at about 60° C. in about 1×SSC. Hybridization reactions can also be performed under “physiological conditions” which is well known to one of skill in the art. A non-limiting example of a physiological condition is the temperature, ionic strength, pH and concentration of Mg²⁺ normally found in a cell.

[0138] A polynucleotide is composed of a specific sequence of four nucleotide bases: adenine (A); cytosine (C); guanine (G); thymine (T); and uracil (U) for thymine when the polynucleotide is RNA. Thus, the term “polynucleotide sequence” is the alphabetical representation of a polynucleotide molecule. This alphabetical representation can be input into databases in a computer having a central processing unit and used for bioinformatics applications such as functional genomics and homology searching. The term “polymorphism” refers to the coexistence of more than one form of a gene or portion thereof. A portion of a gene of which there are at least two different forms, i.e., two different nucleotide sequences, is referred to as a “polymorphic region of a gene”. A polymorphic region can be a single nucleotide, the identity of which differs in different alleles.

[0139] The terms “polynucleotide” and “oligonucleotide” are used interchangeably and refer to a polymeric form of nucleotides of any length, either deoxyribonucleotides or ribonucleotides or analogs thereof. Polynucleotides can have any three-dimensional structure and may perform any function, known or unknown. The following are non-limiting examples of polynucleotides: a gene or gene fragment (for example, a probe, primer, EST or SAGE tag), exons, introns, messenger RNA (mRNA), transfer RNA, ribosomal RNA, ribozymes, cDNA, dsRNA, siRNA, miRNA, recombinant polynucleotides, branched polynucleotides, plasmids, vectors, isolated DNA of any sequence, isolated RNA of any sequence, nucleic acid probes and primers. A polynucleotide can comprise modified nucleotides, such as methylated nucleotides and nucleotide analogs. If present, modifications to the nucleotide structure can be imparted before or after assembly of the polynucleotide. The sequence of nucleotides can be interrupted by non-nucleotide components. A polynucleotide can be further modified after polymerization, such as by conjugation with a labeling component. The term also refers to both double- and single-stranded molecules. Unless otherwise specified or required, any embodiment of this disclosure that is a polynucleotide encompasses both the double-stranded form and each of two complementary single-stranded forms known or predicted to make up the double-stranded form.

[0140] The term “encode” as it is applied to polynucleotides refers to a polynucleotide which is said to “encode” a polypeptide if, in its native state or when manipulated by methods well known to those skilled in the art, it can be transcribed and/or translated to produce the mRNA for the polypeptide and/or a fragment thereof. The antisense strand is the complement of such a nucleic acid, and the encoding sequence can be deduced therefrom.

[0141] As used herein, the term “detectable label” intends a directly or indirectly detectable compound or composition that is conjugated directly or indirectly to the composition to be detected, e.g., polynucleotide or protein such as an antibody so as to generate a “labeled” composition. The term also includes sequences conjugated to the polynucleotide that will provide a signal upon expression of the inserted sequences, such as green fluorescent protein (GFP) and the like. The label may be detectable by itself (e.g. radioisotope labels or fluorescent labels) or, in the case of an enzymatic label, may catalyze chemical alteration of a substrate compound or composition which is detectable. The labels can be suitable for small scale detection or more suitable for high-throughput screening. As such, suitable labels include, but are not limited to radioisotopes, fluorochromes, chemiluminescent compounds, dyes, and proteins, including enzymes. The label may be simply detected or it may be quantified. A response that is simply detected generally comprises a response whose existence merely is confirmed, whereas a response that is quantified generally comprises a response having a quantifiable (e.g., numerically reportable) value such as an intensity, polarization, and/or other property. In luminescence or fluorescence assays, the detectable response may be generated directly using a luminophore or fluorophore associated with an assay component actually involved in binding, or indirectly using a luminophore or fluorophore associated with another (e.g., reporter or indicator) component.

[0142] As used herein, an “antibody” or “antigen-binding polypeptide” refers to a polypeptide or a polypeptide complex that specifically recognizes and binds to an antigen. An antibody can be a whole antibody and any antigen binding fragment or a single chain thereof. Thus the term “antibody” includes any protein or peptide containing molecule that comprises at least a portion of an immunoglobulin molecule having biological activity of binding to the antigen. Examples of such include, but are not limited to a complementarity determining region (CDR) of a heavy or light chain or a ligand binding portion thereof, a heavy chain or light chain variable region, a heavy chain or light chain constant region, a framework (FR) region, or any portion thereof, or at least one portion of a binding protein.

[0143] The terms “antibody fragment” or “antigen-binding fragment”, as used herein, is a portion of an antibody such as F(ab′)₂, F(ab)₂, Fab′, Fab, Fv, scFv and the like. Regardless of structure, an antibody fragment binds with the same antigen that is recognized by the intact antibody. The term “antibody fragment” includes aptamers, spiegelmers, and diabodies. The term “antibody fragment” also includes any synthetic or genetically engineered protein that acts like an antibody by binding to a specific antigen to form a complex.

[0144] A “single-chain variable fragment” or “scFv” refers to a fusion protein of the variable regions of the heavy (V_{H}) and light chains (V_{L}) of immunoglobulins. In some aspects, the regions are connected with a short linker peptide of ten to about 25 amino acids. The linker can be rich in glycine for flexibility, as well as serine or threonine for solubility, and can either connect the N-terminus of the V_{H} with the C-terminus of the V_{L}, or vice versa. This protein retains the specificity of the original immunoglobulin, despite removal of the constant regions and the introduction of the linker. ScFv molecules are known in the art and are described, e.g., in U.S. Pat. No. 5,892,019.

[0145] A “tandem scFv” is composed of two scFvs connected through a short linker, which allows the free rotation of the two separate antigen binding units, thus resulting in a flexible structure.

[0146] The term antibody encompasses various broad classes of polypeptides that can be distinguished biochemically. Those skilled in the art will appreciate that heavy chains are classified as gamma, mu, alpha, delta, or epsilon with some subclasses among them (e.g., .gamma.1-.gamma.4). It is the nature of this chain that determines the “class” of the antibody as IgG, IgM, IgA IgG, or IgE, respectively. The immunoglobulin subclasses (isotypes) e.g., IgG₁, IgG₂, IgG₃, IgG₄, IgG₅, etc. are well characterized and are known to confer functional specialization. Modified versions of each of these classes and isotypes are readily discernable to the skilled artisan in view of the instant disclosure and, accordingly, are within the scope of the instant disclosure. All immunoglobulin classes are clearly within the scope of the present disclosure, the following discussion will generally be directed to the IgG class of immunoglobulin molecules. With regard to IgG, a standard immunoglobulin molecule comprises two identical light chain polypeptides of molecular weight approximately 23,000 Daltons, and two identical heavy chain polypeptides of molecular weight 53,000-70,000. The four chains are typically joined by disulfide bonds in a “Y” configuration wherein the light chains bracket the heavy chains starting at the mouth of the “Y” and continuing through the variable region.

[0147] Antibodies, antigen-binding polypeptides, variants, or derivatives thereof of the disclosure include, but are not limited to, polyclonal, monoclonal, multispecific, human, humanized, primatized, or chimeric antibodies, single chain antibodies, epitope-binding fragments, e.g., Fab, Fab′ and F(ab)₂, Fd, Fvs, single-chain Fvs (scFv), single-chain antibodies, disulfide-linked Fvs (sdFv), fragments comprising either a V_{K} or V_{H} domain, fragments produced by a Fab expression library, and anti-idiotypic (anti-Id) antibodies (including, e.g., anti-Id antibodies to LIGHT antibodies disclosed herein). Immunoglobulin or antibody molecules of the disclosure can be of any type e.g., IgG, IgE, IgM, IgD, IgA, and IgY), class (e.g., IgG1, IgG2, IgG3, IgG4, IgA1 and IgA2) or subclass of immunoglobulin molecule.

[0148] Light chains are classified as either kappa or lambda. Each heavy chain class may be bound with either a kappa or lambda light chain. In general, the light and heavy chains are covalently bonded to each other, and the “tail” portions of the two heavy chains are bonded to each other by covalent disulfide linkages or non-covalent linkages when the immunoglobulins are generated either by hybridomas, B cells or genetically engineered host cells. In the heavy chain, the amino acid sequences run from an N-terminus at the forked ends of the Y configuration to the C-terminus at the bottom of each chain.

[0149] Both the light and heavy chains are divided into regions of structural and functional homology. The terms “constant” and “variable” are used functionally. In this regard, it will be appreciated that the variable domains of both the light (V_{K}) and heavy (V_{H}) chain portions determine antigen recognition and specificity. Conversely, the constant domains of the light chain (CK) and the heavy chain (CH1, CH2 or CH3) confer important biological properties such as secretion, transplacental mobility, Fc receptor binding, complement binding, and the like. By convention the numbering of the constant region domains increases as they become more distal from the antigen-binding site or amino-terminus of the antibody. The N-terminal portion is a variable region and at the C-terminal portion is a constant region: the CH3 and CK domains actually comprise the carboxy-terminus of the heavy and light chain, respectively.

[0150] As indicated above, the variable region allows the antibody to selectively recognize and specifically bind epitopes on antigens. That is, the V_{K} domain and V_{H} domain, or subset of the complementarity determining regions (CDRs), of an antibody combine to form the variable region that defines a three dimensional antigen-binding site. This quaternary antibody structure forms the antigen-binding site present at the end of each arm of the Y. More specifically, the antigen-binding site is defined by three CDRs on each of the V_{H} and V_{K} chains i.e. CDR-H1, CDR-H2, CDR-H3, CDR-L1, CDR-L2 and CDR-L3). In some instances, e.g., certain immunoglobulin molecules derived from camelid species or engineered based on camelid immunoglobulins, a complete immunoglobulin molecule may consist of heavy chains only, with no light chains. See, e.g., Hamers-Casterman et al., Nature 363:446-448 (1993).

[0151] In naturally occurring antibodies, the six “complementarity determining regions” or “CDRs” present in each antigen-binding domain are short, non-contiguous sequences of amino acids that are specifically positioned to form the antigen-binding domain as the antibody assumes its three dimensional configuration in an aqueous environment. The remainder of the amino acids in the antigen-binding domains, referred to as “framework” regions, show less inter-molecular variability. The framework regions largely adopt a b-sheet conformation and the CDRs form loops which connect, and in some cases form part of, the .beta.-sheet structure. Thus, framework regions act to form a scaffold that provides for positioning the CDRs in correct orientation by inter-chain, non-covalent interactions. The antigen-binding domain formed by the positioned CDRs defines a surface complementary to the epitope on the immunoreactive antigen. This complementary surface promotes the non-covalent binding of the antibody to its cognate epitope. The amino acids comprising the CDRs and the framework regions, respectively, can be readily identified for any given heavy or light chain variable region by one of ordinary skill in the art, since they have been precisely defined (see “Sequences of Proteins of Immunological Interest,” Kabat, E., et al., U.S. Department of Health and Human Services, (1983); and Chothia and Lesk, J. Mol. Biol., 196:901-917 (1987), which are incorporated herein by reference in their entireties).

[0152] In the case where there are two or more definitions of a term which is used and/or accepted within the art, the definition of the term as used herein is intended to include all such meanings unless explicitly stated to the contrary. A specific example is the use of the term “complementarity determining region” (“CDR”) to describe the non-contiguous antigen combining sites found within the variable region of both heavy and light chain polypeptides. This particular region has been described by Kabat et al., U.S. Dept. of Health and Human Services, “Sequences of Proteins of Immunological Interest” (1983) and by Chothia et al., J. Mol. Biol. 196:901-917 (1987), which are incorporated herein by reference in their entireties. The CDR definitions according to Kabat and Chothia include overlapping or subsets of amino acid residues when compared against each other. Nevertheless, application of either definition to refer to a CDR of an antibody or variants thereof is intended to be within the scope of the term as defined and used herein. The appropriate amino acid residues which encompass the CDRs as defined by each of the above cited references are set forth in the table below as a comparison. The exact residue numbers which encompass a particular CDR will vary depending on the sequence and size of the CDR. Those skilled in the art can routinely determine which residues comprise a particular CDR given the variable region amino acid sequence of the antibody.

[0153] Kabat et al. also defined a numbering system for variable domain sequences that is applicable to any antibody. One of ordinary skill in the art can unambiguously assign this system of “Kabat numbering” to any variable domain sequence, without reliance on any experimental data beyond the sequence itself. As used herein, “Kabat numbering” refers to the numbering system set forth by Kabat et al., U.S. Dept. of Health and Human Services, “Sequence of Proteins of Immunological Interest” (1983).

[0154] In addition to table above, the Kabat number system describes the CDR regions as follows: CDR-H 1 begins at approximately amino acid 31 (i.e., approximately 9 residues after the first cysteine residue), includes approximately 5-7 amino acids, and ends at the next tryptophan residue. CDR-H2 begins at the fifteenth residue after the end of CDR-H1, includes approximately 16-19 amino acids, and ends at the next arginine or lysine residue. CDR-H3 begins at approximately the thirty third amino acid residue after the end of CDR-H2; includes 3-25 amino acids; and ends at the sequence W-G-X-G, where X is any amino acid. CDR-L1 begins at approximately residue 24 (i.e., following a cysteine residue); includes approximately 10-17 residues; and ends at the next tryptophan residue. CDR-L2 begins at approximately the sixteenth residue after the end of CDR-LI and includes approximately 7 residues. CDR-L3 begins at approximately the thirty third residue after the end of CDR-L2 (i.e., following a cysteine residue); includes approximately 7-11 residues and ends at the sequence For W-G-X-G, where X is any amino acid.

[0155] Antibodies disclosed herein may be from any animal origin including birds and mammals. Preferably, the antibodies are human, murine, donkey, rabbit, goat, guinea pig, camel, llama, horse, or chicken antibodies. In another embodiment, the variable region may be condricthoid in origin (e.g., from sharks).

[0156] As used herein, the term “heavy chain constant region” includes amino acid sequences derived from an immunoglobulin heavy chain. A polypeptide comprising a heavy chain constant region comprises at least one of a CH1 domain, a hinge (e.g., upper, middle, and/or lower hinge region) domain, a CH2 domain, a CH3 domain, or a variant or fragment thereof. For example, an antigen-binding polypeptide for use in the disclosure may comprise a polypeptide chain comprising a CH1 domain; a polypeptide chain comprising a CH1 domain, at least a portion of a hinge domain, and a CH2 domain; a polypeptide chain comprising a CH1 domain and a CH3 domain; a polypeptide chain comprising a CH1 domain, at least a portion of a hinge domain, and a CH3 domain, or a polypeptide chain comprising a CH1 domain, at least a portion of a hinge domain, a CH2 domain, and a CH3 domain. In another embodiment, a polypeptide of the disclosure comprises a polypeptide chain comprising a CH3 domain. Further, an antibody for use in the disclosure may lack at least a portion of a CH2 domain (e.g., all or part of a CH2 domain). As set forth above, it will be understood by one of ordinary skill in the art that the heavy chain constant region may be modified such that they vary in amino acid sequence from the naturally occurring immunoglobulin molecule.

[0157] The heavy chain constant region of an antibody disclosed herein may be derived from different immunoglobulin molecules. For example, a heavy chain constant region of a polypeptide may comprise a CH1 domain derived from an IgG, molecule and a hinge region derived from an IgG3 molecule. In another example, a heavy chain constant region can comprise a hinge region derived, in part, from an IgG, molecule and, in part, from an IgG3 molecule. In another example, a heavy chain portion can comprise a chimeric hinge derived, in part, from an IgG, molecule and, in part, from an IgG4 molecule.

[0158] As used herein, the term “light chain constant region” includes amino acid sequences derived from antibody light chain. Preferably, the light chain constant region comprises at least one of a constant kappa domain or constant lambda domain.

[0159] A “light chain-heavy chain pair” refers to the collection of a light chain and heavy chain that can form a dimer through a disulfide bond between the CL domain of the light chain and the CH1 domain of the heavy chain.

[0160] As previously indicated, the subunit structures and three dimensional configuration of the constant regions of the various immunoglobulin classes are well known. As used herein, the term “V_{H} domain” includes the amino terminal variable domain of an immunoglobulin heavy chain and the term “CH1 domain” includes the first (most amino terminal) constant region domain of an immunoglobulin heavy chain. The CH1 domain is adjacent to the V_{H} domain and is amino terminal to the hinge region of an immunoglobulin heavy chain molecule.

[0161] As used herein the term “CH2 domain” includes the portion of a heavy chain molecule that extends, e.g., from about residue 244 to residue 360 of an antibody using conventional numbering schemes (residues 244 to 360, Kabat numbering system; and residues 231-340, EU numbering system; see Kabat et al., U.S. Dept. of Health and Human Services, “Sequences of Proteins of Immunological Interest” (1983). The CH2 domain is unique in that it is not closely paired with another domain. Rather, two N-linked branched carbohydrate chains are interposed between the two CH2 domains of an intact native IgG molecule. It is also well documented that the CH3 domain extends from the CH2 domain to the C-terminal of the IgG molecule and comprises approximately 108 residues.

[0162] As used herein, the term “hinge region” includes the portion of a heavy chain molecule that joins the CH1 domain to the CH2 domain. This hinge region comprises approximately 25 residues and is flexible, thus allowing the two N-terminal antigen-binding regions to move independently. Hinge regions can be subdivided into three distinct domains: upper, middle, and lower hinge domains (Roux et al., J. Immunol 161:4083 (1998)).

[0163] As used herein the term “disulfide bond” includes the covalent bond formed between two sulfur atoms. The amino acid cysteine comprises a thiol group that can form a disulfide bond or bridge with a second thiol group. In most naturally occurring IgG molecules, the CH1 and CK regions are linked by a disulfide bond and the two heavy chains are linked by two disulfide bonds at positions corresponding to 239 and 242 using the Kabat numbering system (position 226 or 229, EU numbering system).

[0164] As used herein, the term “chimeric antibody” will be held to mean any antibody wherein the immunoreactive region or site is obtained or derived from a first species and the constant region (which may be intact, partial or modified in accordance with the instant disclosure) is obtained from a second species. In certain embodiments the target binding region or site will be from a non-human source (e.g. mouse or primate) and the constant region is human.

[0165] As used herein, “percent humanization” is calculated by determining the number of framework amino acid differences (i.e., non-CDR difference) between the humanized domain and the germline domain, subtracting that number from the total number of amino acids, and then dividing that by the total number of amino acids and multiplying by 100.

[0166] By “specifically binds” or “has specificity to,” it is generally meant that an antibody binds to an epitope via its antigen-binding domain, and that the binding entails some complementarity between the antigen-binding domain and the epitope. According to this definition, an antibody is said to “specifically bind” to an epitope when it binds to that epitope, via its antigen-binding domain more readily than it would bind to a random, unrelated epitope. The term “specificity” is used herein to qualify the relative affinity by which a certain antibody hinds to a certain epitope. For example, antibody “A” may be deemed to have a higher specificity for a given epitope than antibody “B,” or antibody “A” may be said to bind to epitope “C” with a higher specificity than it has for related epitope “D.”

[0167] As used herein, the terms “treat” or “treatment” refer to both therapeutic treatment and prophylactic or preventative measures, wherein the object is to prevent or slow down (lessen) an undesired physiological change or disorder, such as the progression of cancer. Beneficial or desired clinical results include, but are not limited to, alleviation of symptoms, diminishment of extent of disease, stabilized (i.e., not worsening) state of disease, delay or slowing of disease progression, amelioration or palliation of the disease state, and remission (whether partial or total), whether detectable or undetectable. “Treatment” can also mean prolonging survival as compared to expected survival if not receiving treatment. Those in need of treatment include those already with the condition or disorder as well as those prone to have the condition or disorder or those in which the condition or disorder is to be prevented.

[0168] By “subject” or “individual” or “animal” or “patient” or “mammal,” is meant any subject, particularly a mammalian subject, for whom diagnosis, prognosis, or therapy is desired. Mammalian subjects include humans, domestic animals, farm animals, and zoo, sport, or pet animals such as dogs, cats, guinea pigs, rabbits, rats, mice, horses, cattle, cows, and so on.

[0169] As used herein, phrases such as “to a patient in need of treatment” or “a subject in need of treatment” includes subjects, such as mammalian subjects, that would benefit from administration of an antibody or composition of the present disclosure used, e.g., for detection, for a diagnostic procedure and/or for treatment.

[0170] This disclosure describes the development of bispecific antibodies, which can be applied to cancer therapy. To accomplish this goal, two tetrameric bispecific antibodies (tBsAbs) with dual specificity for the GITR protein and the PD-L1 protein were created. An advantage of these constructs is that they will enhance anti-tumor response by activating T cells and abrogating regulatory T cell suppression. Also described are the anti-CCR4-anti-PDL1 tBsAb (FIGS. 3 and 4) and anti-CAIX-anti-PDL1 (FIGS. 5 and 6).

[0171] Here is described two different formats of tandem scFv fragment dimerization units in a pcDNA3.4 mammalian expression vector. In the first construct, the tandem scFvs comprise two scFvs derived from distinct parental antibodies. The αGITR scFv and αPD-L1 scFv are connected in tandem by an IgG1 hinge region between two flexible linkers. The first construct has a structure of VH GITR10-linker-VL GITR10-linker-hinge-linker-VH PD-L1-linker-VL PD-L1 and its sequence was confirmed by DNA sequencing. The second format was constructed equivalently to the first one. Yet, it includes an additional domain, e.g., a CH2 domain, introduced between the hinge and one linker region. The second construct has a structure of VH GITR-linker-VL GITR-linker-hinge-CH2-linker-VH PD-L1-linker-VL PD-L1. In contrast to the first construct, the second construct includes an Fc domain, potentially resulting in a trifunctional tBsAb.

[0172] Both tBsAbs were successfully expressed by transient transfection in HEK cells and purified by affinity chromatography using Ni-NTA agarose.

[0173] The purified proteins were evaluated by SDS-PAGE and results showed that under reducing conditions all protein profiles of the tBsAbs exhibit one single band and are congruent with the theoretical value of a tandem scFv (taFv): 65 kDa for αGITR-αPD-L1 taFv and 75 kDA for αGITR-αPD-L1 with CH2 taFv. Under non-reducing conditions the predicted molecular weight of αGITR-αPD-L1 (130 kDa) and αGITR-αPD-L1 with CH2 (150 kDa) tBsAbs match the apparent molecular weight (See, FIG. 18).

[0174] ELISA and flow cytometry demonstrated the biological activities of the newly designed tBsAbs. In ELISA the retained binding activity of the αPD-L1 arm of the produced BsAb was preserved in vitro and showed similar binding activity as the αPD-L1 mAb. Unspecific binding of the tBsAbs was to be ruled out since CCR4, to which the αGITR-αPD-L1 antibodies do not bind, did not show any signal. Furthermore, similar binding activity of the αGITR arm for both produced BsAb (αGITR-αPD-L1 and αGITR-αPD-L1 with CH2) to the GITR protein was observed. Unspecific binding was likewise excluded from this arm since the αGITR-αPD-L1 antibodies did not show any binding specificity for GITR-CF2 cells. When comparing the αGITR IgG to each BsAb, the αGITR IgG showed higher binding in the ELISA experiment, suggesting a lower affinity of the tBsAbs. Nevertheless depending on the spatial arrangement of the antigen binding sites as well as the antigen surface distribution bivalency of the tBsAbs can increase avidity, which can compensate for weak binding.

[0175] The flow cytometry analyses of αGITR-αPD-L1 tested with GITR+CF2 cells suggests that the novel tBsAb recognize the GITR protein in its native conformation when expressed on cells. A similar binding affinity of the αGITR-αPD-L1 tBsAb compared to the GITR mAb was observed. The ELISA and Flow cytometry analyses therefore demonstrated the capability of the αGITR10-αPD-L1 and αGITR10-αPD-L1 with CH2 to specifically recognize the corresponding antigen when expressed on cells, as would be the case in vivo. These characterization studies exhibited similar binding behavior of the αGITR-αPD-L1 and αGITR-αPD-L1 with CH2.

[0176] An important aspect of the αGITR10-αPD-L1 with CH2 lays in its function in inducing complement-dependent cytotoxicity (CDC) and antibody-dependent cellular cytotoxicity (ADCC). These functions further the beneficial effects of the tBsAb when targeting tumor cells for destruction.

[0177] In the ADCC analysis the αGITR10-αPD-L1 and αGITR10-αPD-L1 with CH2 displayed surprising results using GITR+CF2 as target cells and WIL2-S as effector cells (E/T=5:1). For αGITR10-αPD-L1 and αGITR10-αPD-L1 with CH2 antibodies the raw signal of the luciferase activity decreased with higher antibody concentrations and was substantially lower than the signal for sole target and effector cells (See FIG. 30).

[0178] The herein-described methods allow generation of tBsAb involving only one cloning step. The tBsAb preserves the dual affinity towards the GITR protein and PD-L1 antigen in a small-sized molecule of only about 150 kDa. Such tBsAbs will be critical for effective cancer therapeutics.

### EXAMPLES

### Example 1: Cloning of αGITR-αPD-L1 Tetrameric Bispecific Antibody (tBsAb)

### Cloning Strategy

[0179] The goal was to clone a plasmid that contained two recombinant single chain variable fragments (scFvs), originating from different parental antibodies and joined by a flexible linker. While one of the scFvs is directed against the GITR protein, the other is directed against PD-L1. Such a plasmid will produce two scFvs that are covalently joined by a linker-hinge-linker domain and result in a tetrameric bispecific antibody (αGITR-αPD-L1 tBsAb).

[0180] The mammalian expression vector pcDNA3.4 plasmid was the basis for constructs (V_{H}GITR-linker-V_{L}GITR-linker-hinge-linker-V_{H}PD-L1-linker-V_{L}PD-L1). The fundamental structure of pcDNA 3.4 expression vector contained beforehand the V_{H}^{X}-linker-V_{L}^{X}-linker-hinge-linker-V_{H}PD-L1-linker-V_{L}PD-L1 gene fused to an N-terminal 6x-His tag (SEQ ID NO: 1084) (FIG. 12).

### Restriction Enzyme Digestion and Ligation

[0181] Six αGITR scFv gene sequences were individually cloned into the pcDNA3.4 expression vector. The six V_{H}GITR-linker-V_{L}GITR gene sequences were labeled as V_{H}GITRL1-V_{L}GITRL1, V_{H}GITRL10-V_{L}GITRL10, V_{H}GITRL1I-V_{L}GITRL11, V_{H}GITRL14-V_{L}GITRL14, V_{H}GITRL15-V_{L}GITRL15 and V_{H}GITRL17-V_{L}GITRL17. All six αGITR gene sequences are flanked by SfI and NotI restriction sites and were isolated from the respective donor plasmids by digestion (Table 1). Similarly, the pcDNA3.4 expression vector was also digested with the SfI and NotI restriction enzymes. The digested vectors and fragments were analyzed on a 1% agarose gel and were purified using a QIAquick Gel Extraction Kit. Cohesive inserts from the SfI and NotI digestion were ligated into the corresponding vector pcDNA 3.4 at a fivefold molar ratio using the T4 Ligation Kit. Fifty nanograms of the recipient vector were used per ligation reaction. The ligation product resulted in the final configuration of V_{H}GITR-linker-V_{L}GITR-linker-hinge-linker-V_{H}PD-L1-linker-V_{L}PD-L1 (FIG. 12).

[0182] Three additional clones were constructed each to generate the control antibodies. The F10 gene was chosen as the ‘control arm’; since V_{H}F10-V_{L}F10 binding domain does not have binding affinity to GITR nor to PD-L1 protein. Thus, this domain was defined as negative control. F10 is a validated antibody directed against influenza HA protein. To keep the same antibody format, its gene sequences only replace either V_{H}GITR1-linker-V_{L}GITR1 or V_{H}PD-L1-linker-V_{L}PD-L1, respectively. The three control plasmids exhibit the following sequencing order:
[0183] (1) V_{H}F10-linker-V_{L}F10-linker-hinge-linker-V_{H}PD-L1-linker-V_{L}PD-L1 (F10-αPD-L1)
[0184] (2) V_{H}GITR1-linker-V_{L}GITR1-linker-hinge-linker-V_{H}F10-linker-V_{L}F10 (αGITR1-F10)
[0185] (3) V_{H}GITR10-linker-V_{L}GITR10-linker-hinge-linker-V_{H}F10-linker-V_{L}F10 (αGITR10-F10)

### Construction of Plasmid (1):

[0186] The V_{H}F10-linker-V_{L}F10 gene was isolated from a pcDNA 3.1 vector through the digestion with SfiI and NotI RE. As for the expression vector, the same pcDNA3.4 vector was used (FIG. 13). It contains the SfiI and NotI restriction sites at the desired site of insertion and was therefore digested with the corresponding restriction enzymes. The final plasmid was obtained by ligating both digested products to each other. The ligation was performed using T4 Ligation Kit at 16° C. overnight.

### Procedure for the Construction of Plasmids (2) and (3):

[0187] In order to replace the OPD-L1 scFv in the previous construct, a forward and a reverse primer were designed and synthesized to introduce the BsiWI and BamHI restriction site and the 5′ and 3′ of the V_{H}F10-linker-V_{L}F10 fragment, respectively. After PCR amplification, the PCR products containing V_{H}F10-linker-V_{L}F10 and the pcDNA3.4 expression vector were digested with BsiWI and BamHI and used to replace the DNA fragments encoding V_{H}PD-L1-linker-V_{L}PD-L1 within the previously constructed expression plasmids, V_{H}GITR¹-linker-V_{L}GITR¹-linker-hinge-linker-V_{H}PD-L1-linker-V_{L}PD-L1 and V_{H}GITR¹⁰-linker-V_{L}GITR¹⁰-linker-hinge-linker-V_{H}PD-L1-linker-V_{L}PD-L1. The digested expression vector and inserts were gel-purified (1% agarose) using QIAquick gel extraction Kit and subsequently ligated to each other by Quick ligation (5 minutes, at RT). This procedure yielded the plasmids (2) and (3) (FIG. 14).

### Primer Design for the Construction of the Control Plasmid Constructs

[0188] As described above, two primers were designed for control plasmids (2) and (3) to isolate V_{H}F10-linker-V_{L}F10. The forward primer (5′-3′) was designed to bind on the 3′ prime end of the complementary strand of the DNA; the reverse primers (3′-5′) were designed to bind on the 3′ prime end of the main DNA strand and were reverse complementary. The primers were about 20 bp long with an optimal melting temperature between 62 and 65° C. and not deviating more than +1° C. The forward primer (containing the BsiWI restriction site (No. 1) and the reverse primer (containing the BamHI restriction site (No. 2)) were synthesized by Genewiz. For the PCR reaction 100 ng DNA template (pcDNA 3.1) was used in the thermal cycling. The PCR product was purified with a QIAquick PCR Purification Kit according to the manufactures protocol and analyzed on a 1% agarose gel.

### Example 2: Cloning of αGITR10-αPD-L1 Tetrameric Bispecific Antibody (tBsAb) Containing a CH2 Domain

### Cloning Strategy

[0189] The aim of this example was to introduce a CH2 domain from an IgG1 into the previously-constructed plasmid, leading to the basic structure of V_{H}GITR-linker-V_{L}GITR-linker-hinge-CH2-linker-V_{H}PD-L1-linker-V_{L}PD-L1. The addition of CH2 adds an effector function, resulting in a trifunctional tBsAb.

[0190] The pcDNA3.4 expression vector containing αGITR10-αPDL1 served as the template used for the construction of the new plasmid. A new restriction site HindIII was introduced by site-directed mutagenesis between the IgG1 hinge region and the linker (GGGGS)₆ (SEQ ID NO: 1909). This newly constructed restriction site served as the cloning site for the IgG1 constant CH2 domain (see FIG. 15). The HindIII restriction site was chosen for several reasons. The HindIII restriction site is unique in the plasmid and its genomic sequence is not similar to its adjacent coding region. Nevertheless, HindIII features some drawbacks such as the relative long length (6 nucleotides) possibly diminishing the mutagenesis efficacy.

[0191] The IgG1 plasmid was used as a template to isolate the CH2 domain. The CH2 sequence was amplified by PCR using primers containing the restriction site HindIII. The pcDNA 3.4 expression vector (V_{H}GITR¹⁰-linker-V_{L}GITR¹⁰-linker-hinge-HindIII*-V_{H}PD-L1-linker-V_{L}PD-L1) and the amplified CH2 fragments were digested with the corresponding restriction enzymes. The digested vectors and fragments were gel-purified (1% agarose) using QIAquick gel extraction Kit. Cohesive inserts from the HindIII digest were ligated into the vector (pcDNA 3.4) with twentyfold insert using the Quick Ligation Kit resulting in the construction of a new plasmid V_{H}GITR¹⁰-linker-V_{L}GITR¹⁰-linker-hinge-CH2-linker-V_{H}PD-L1-linker-V_{L}PD-L1.

### Site-Directed Mutagenesis

[0192] Mutagenesis of the GITR10-PDL1 vector was accomplished with the use of QuikChange Lightning Site-Directed Mutagenesis Kit (Aligent Technologies®) following the manufacturer's protocol. Two oligonucleotide primers were synthesized, each complementary to the opposite strand of the vector. Both primers contained HindIII as the desired mutation.

[0193] The primers were designed to exhibit the HindIII mutation in the middle of the primer flanked by 7 to 10 bases. The oligonucleotide primers were used for extension by PfuUltra HF DNA Polymerase during temperature cycling. This approach enabled the generation of a mutated plasmid containing staggered nicks. During the next temperature cycle, the product was treated with DpnI to digest the parental DNA template containing methylated and hemimethylated DNA. As a control, the 4.5-kp pWhitescript plasmid was used to test the mutant plasmid. The pWhitescript plasmid codes a stop codon (TAA) at the position where a glutamine codon would appear in the β-galactosidase gene of the pBluescript II, usually obliterating the blue color of the colonies on LB-ampicillin agar plate containing IPTG and Xgal. However, the oligonucleotide control primers create a point mutation on the pWhitescript 4.5-kb control plasmid that reverts the T residue of the stop codon to C, thereby producing the phenotype of blue color on media containing IPTG and X-gal. After the cycling, 2 μL of the DpnI restriction enzyme was added (37° C., 5 min) to digest the parental dsDNA. The mutagenesis plasmid was then transformed into XL10Gold® Ultracompetent cells and spread on LB-ampicillin agar plates containing 80 μg/ml X-gal and 20 mM IPTG (37° C.; >16 hours). On the following day, 16 clones were picked from the LB-ampicillin plates, purified using QIAprep spin Miniprep Kit and digested with HindIII and NotI restriction enzymes to identify successfully-mutated clones. Positive clone No. 10 (GITR10-PDL1 with HindIII) was subjected to another digestion to compare it with the original plasmid GITR10-PDL1 (no HindIII). Each sample was individually digested with HindIII or BamHI and simultaneously with HindIII and BamHI-HF together, resulting in a total of six digestions (see Table 1 below).

TABLE 1
Parameters and volumes for the total six restriction
enzyme digestions

| | GITR10-PDL1 with | | | | | |
|---|---|---|---|---|---|---|
| Digestion | HindIII restriction site | | | GITR10-PDL1 | | |
| Parameters | 1 | 2 | 3 | 1 | 2 | 3 |
| Plasmid | 3.1 | 3.1 | 3.1 | 3.1 | 3.1 | 3.1 |
| (2.0 μg) [μL] | | | | | | |
| 10x Cutsmart | 3.0 | 3.0 | 3.0 | 3.0 | 3.0 | 3.0 |
| (NEB ®) [μL] | | | | | | |
| HindIII-HF | 0.5 | — | 0.5 | 0.5 | — | 0.5 |
| (20,000 U/mL, | | | | | | |
| NEB ®) [μL] | | | | | | |
| BamHI-HF | — | 0.5 | 0.5 | — | 0.5 | 0.5 |
| 20,000 | | | | | | |
| U/mL [μL] | | | | | | |
| ddH2O | ad. 30 | ad. 30 | ad. 30 | ad. 30 | ad. 30 | ad. 30 |
| (Mili-Q ®) | | | | | | |
| [μL] | | | | | | |

The six samples were incubated for incubated for 2 hours at 37° C. and analyzed in a 1% agarose gel.

[0194] The bacteria containing the positively-mutated clone No. 10 were amplified overnight at 37° C. in 120 mL YT medium followed by plasmid DNA purification, using the QIAGEN Plasmid Maxi Kit. The correct construct, containing HindIII restriction site, was confirmed by sequencing (Genewiz®, using pre-designed primers. A glycerol stock was prepared and stored at −80° C. The recipient plasmid containing HindIII domain and the CH2 fragment were digested with HindIII and subsequently ligated to each other. Ligation products were transformed by heat-pulse into XL10-Gold® Ultracompetent cells according to the protocol described herein. The correct plasmid was verified by sequencing (Genewiz®).

### Transformation

[0195] Ligation products were transformed by heat-pulse into XL10-Gold® Ultracompetent cells. These cells were gently thawed on ice. For each transformation, 45 μL of the cells were mixed with 2 μL of B-Mercaptoethanol and 1.5 μL of the interested DNA. The transformation reaction was incubated for 30 minutes followed by heat-pulse in a 42° C. water bath for 40 seconds. 0.5 mL of S.O.C Medium (Life Technologies®) was added to each tube and incubated for one hour at 37° C. The transformation reaction was grown overnight on LB-ampicillin plates at 37° C.

[0196] Several colonies per ligation sample were picked individually and grown in 1.5 mL 2-YT medium for 8 hours. Plasmids of the picked clones were purified using the QIAprep Spin Miniprep Kit as specified by the manufacturer. Correct plasmids were verified by sequencing (Genewiz®). Bacteria of positive clones were grown overnight in 120 mL YT medium (37° C., 240 rpm) and plasmid DNA was purified using the QIAGEN Plasmid Maxi Kit (as per manufacturer's protocol). Glycerol stocks were prepared by adding 400 μL glycerol and 600 μL of the culture into cryotube vials and then stored at −80° C.

### Cell Culture & Transfection

[0197] For protein expression 293F human cell lines 293F were obtained from Life Technologies® and 293 T adherent cell line from the ATCC cell bank. For cell-based ELISA assays, CF2-GITR cell lines were generated in the Marasco Laboratory to express GITR on cell surface.

### 293F Cells in Suspension for Protein Expression

[0198] Suspension cultures of 293F cells (derived from human embryonic kidney cells; HEK cells) were maintained in Erlenmeyer flasks (Corning®) and in 293 freestyle medium (Life Technologies®) at 37° C. and with 5% CO₂. Cells were passaged during log growth phase and were diluted into an optimal density (200,000 cells/mL) with fresh medium for continued growth.

### 293T and the CF2-GITR Adherent Cells

[0199] Adherent 293T or CF2-GITR cells were maintained in 75 cm2 flasks (Cellstar) and DMEM medium (Life Technologies®) supplemented with 10% FBS (fetal bovine serum) (Life Technologies®) and 1% SP (Sodium Pyruvate) (Life Technologies®) at 37° C. in 5% CO₂. Cells were passaged at 80-100% confluency and were diluted to an optimal seeding density (2×10⁶ cells) with fresh medium for continued growth.

### Transfection

[0200] For the production of the tetrameric bispecific antibody (tBsAb) (αGITR1-αPD-L1, αGITR10-αPD-L1, αGITR11-αPD-L1, αGITR14-αPD-L1, αGITR15-αPD-L1, αGITR17-αPDL1 and αGITR10-αPD-L1 (with CH2)) and the control antibodies (αGITR1-F10, αGITR10-F10, F10-αPD-L1, αGITR IgG), 293 F or 293T cells were transfected with the respective plasmids.

### Polyethlenimine (PEI)-Mediated Transient Transfection in 293F HEK Cells

[0201] One day before transfection, cells were passed into a final concentration of 6×10⁵ cells/mL in a total volume of 300 mL. On the day of transfection, the cell density was between 1.0×10⁶ and 1.4×10⁶ cells/mL. The respective plasmids were prepared for transfection. The overall charge of the transfection complexes is determined by the ratio of transfection reagent to the DNA. The negative charge contributed by the phosphates in the DNA backbone is offset by the positive charge of the transfection reagent. This allowed good complex formation and for neutralization of the electrostatic repulsion imparted on the DNA by the negatively-charged cell membrane. A 1:1 ratio of Plasmid:PEI allowed full binding of polymer to DNA and full condensation occurred to protect the cargo; however, the excess of PEI is critical for overcoming the inhibitory effects of the anionic cell surface. For every million cells, 1 μg plasmid and 3 μg PEI were used for transfection and each was diluted into 15 mL Opti-MEM (Reduced Serum Medium) (Life Technologies®) separately. Diluted PEI was added to the plasmid and incubated at RT for 20 minutes. The efficiency of neutralization increases with time of exposure to the PEI-DNA complex; however excessively long exposure to lipid reagents can be toxic. The PEI/Plasmid complex was poured into the 293F suspension cells (1×10⁶ cells/mL; 300 mL per flask) and was incubated at 37° C. at 140 rpm for 6 days.

### Polyethlenimine (PEI) Mediated Transient Transfection in 293T HEK Cells

[0202] Transfection of 293T HEK with use of PEI cells follows the same protocol as described above for the 293F suspension HEK cells with a couple of small changes. Transfection was done on 293T cells growing at 80% confluency in tissue culture dishes (200 mm) diluted DMEM medium supplemented with 10% FBS. For 40 μg of DNA, 200 μg of PEI was used (a 1:5 ratio) and each was diluted separately in 1 mL Opti-MEM (Reduced Serum Medium) (Life Technologies®) separately. The diluted PEI was added to the plasmid and stored at RT for 20 minutes. The DNA/PEI complex was added gently, drop wise, into the dish to prevent cell detachment and death. The cells were then incubated at 37° C. for 2 days.

### Example 3: Protein Purification

[0203] Ni-NTA Purification of bispecific antibody antibodies Suspension of 293 HEK cells were harvested and centrifuged at 5000 rpm, 4° C. for 35 minutes. To purify the bi-specific antibodies via their N-terminal 6×His-tags (SEQ ID NO: 1084), the filtered supernatant (0.22 μm PEV, Costar®) was incubated for 2 hours (240 rpm, RT) with 1 mL of Ni-NTA agarose (Qiagen). The supernatant was passed twice over a 15 ml Ni-NTA Sepharose gravity flow column. After washing, the column containing the beads were washed with four column volumes of Ni-NTA washing buffer (0.02M Imidazole, 0.3M NaCl, 1M Tris HCl (pH=7.0)) the protein was slowly eluted with 13 mL of Ni-NTA elution buffer (0.5M Imidazole, 0.3 NaCl, 0.02 Tris HCl (pH=7.0)). The buffer of the eluted protein was exchanged by PBS buffer using centrifugal filter units 100,000 MW (Amicon®). The yield of the tBsAbs and was measured with the NanoDrop ND-1000.

### Protein A Purification of αGITR IgG Antibody

[0204] The αGITR IgG antibodies were harvested from the suspension of 293 HEK cells and centrifuged at 5000 rpm, 4° C. for 35 minutes. To purify the αGITR IgG antibodies via the Fc domain, the filtered supernatant was incubated (RT, shaking) with 1 mL of Protein A (GE Lifesciences) for 2 hours then passed twice over a 15 ml gravity flow column (Biorad) followed by 10 mL PBS for washing. The αGITR IgG was eluted with 2 ml TEA (100 nM) and 200 μL of Tris-HCl (1M, (pH=7)) was added to the elution in order to neutralize TEA. An additional 2 mL PBS was added onto column, and was collected into the tube with the eluted protein.

### Example 4: Protein Characterization

### SDS-PAGE Analysis

[0205] SDS-PAGE analysis was used to verify the purity of proteins, according to the NuPAGE NuPAGE® technical guide (Invitrogen). NuPAGE Bis-Tris Gels (4-12%) (Novex) were used in MES SDS running buffer, with a total protein amount between 3 μg and 5 μg. The protein samples were mixed with 4×LDS sample buffer (Novex), containing dodecylsulfate, to denature the protein. Under reducing conditions the protein samples were additionally boiled at 100° C. for 10 minutes. The samples were then loaded onto Novex Bis-Tris Gels in MES SDS running buffer. The gel was run in a Xcell SureLock Mini-Cell at 200V for 35 minutes and then processed with Coomassie G-250 staining with simplyBlue™ Safe Stain (Novex).

[0206] Direct ELISA of αGITR-αPD-L1 on passively adsorbed soluble PD-L1 antigen A Maxisorb 96 well plate (Costar®) was coated with 100 μL of 5 μg/mL PD-L1 rabbit Fe antigen and CCR4 protein (negative control) in PBS overnight at RT. On the following day, the plate was washed 3 times with PBS and blocked for 2 hours at RT with 200 μL blocking solution (2% BSA in PBS). The plate was washed 3 times with PBS. The primary antibodies αGITR1-αPD-L1, αGITR10-αPD-L1, αGITR11-αPD-L1, αGITR14-αPD-L1, αGITR15-αPD-L1, αGITR17-αPD-L1, F10-αPD-L1 BsAB and commercial anti-mouse PD-L1 mAb (Biolegend) prepared in 1×PBS with variable concentrations and added to the wells (100 μL) for 2 hours incubation at room temperature. The highest concentration of antibody tested was at 1 μg/mL and then serially diluted in a ten-fold manner until the 1×10⁻⁵ μg/mL dilution. Each sample was run in triplicate at every concentration. Several controls were set-up and are listed in the table below (Table 2). The 96 well plate (Costar) was washed three times with 1×PBS buffer. A solution of the secondary antibody (6×His-HRP (Thermoscientific) (“6×His” disclosed as SEQ ID NO: 1084) and Goat anti-mouse IgG Fc, HRP conjugate (Thermoscientific) were diluted (1:2000 and 1:5000) in 1×PBS. The secondary antibodies (100 μL) were added to each well and incubated for 2 hours at room temperature. Finally, each well was washed four times with PBS. The 96 well plate was developed with 100 μL TBM substrate solution (Thermoscientific); after development 100 μL phosphoric acid stop solution (Thermoscientific) was added. The endpoint OD data was recorded at 450 nm with Bio-Rad Benchmark Plus and analyzed with the Microplate Manager 5.2.1 software.

TABLE 2
Experimental Overview on tested samples and controls
for direct ELISA of αGITR-αPD-L1 on passively adsorbed
PD-1 antigen (“6xHis” disclosed as SEQ ID NO: 1084)

| | Test- | Primary | Secondary | | Expected |
|---|---|---|---|---|---|
| Antigen | Type | AB | AB | Purpose | signal |
| PD-L1 | Sample | αGITR- | Anti | Sample | Positive |
| rabbit | | αPD-L1 | 6xHis-HRP | testing | |
| Fc | | tetrameric | (Thermo- | | |
| fusion | | bispecific | scientific) | | |
| protein | | antibodies | | | |
| | | Commercial | Goat | Standard and | Positive |
| | | mouse anti | anti-mouse | verification | |
| | | human | IgG Fc, HRP | that PD-1 | |
| | | PD-L1 mAb | conjugate | rabbit Fc | |
| | | (Biolegend) | (Thermo- | can be | |
| | | | scientific) | labeled | |
| | Control | No | Anti | Measure | Negative |
| | | | 6xHis-HRP | unspecific | |
| | | | (Thermo- | binding | |
| | | | scientific) | | |
| | | No | Goat | Measure | Negative |
| | | | anti-mouse | unspecific | |
| | | | IgG Fc, HRP | binding | |
| | | | conjugate | | |
| | | | (Thermo- | | |
| | | | scientific) | | |
| CCR4- | Control | Commercial | Anti | Verification | Negative |
| human | | anti mouse | 6xHis-HRP | of specific | |
| Fc | | PD-L1 mAb | (Thermo- | binding of | |
| | | (Biolegend) | scientific) | samples | |
| | | No | Anti | Measure | Negative |
| | | | 6xHis-HRP | unspecific | |
| | | | (Thermo- | binding | |
| | | | scientific) | | |
| | | No | Goat | Measure | Negative |
| | | | anti-mouse | unspecific | |
| | | | IgG Fc, HRP | binding | |
| | | | conjugate | | |

### Cell-Based ELISA of αGITR-αPD-L1 BsAbs on GITR+CF2

[0207] For the cell-based ELISA, the αGITR1-αPD-L1, αGITR10-αPD-L1 and αGITR10-αPD-L1 with CH2 antibodies were tested for retained binding capability on GITR+CF2 cells. In total, four ELISA experiments were set up.

[0208] The first cell-based ELISA the αGITR1-F10 and the αGITR10-F10 tetrameric bispecific antibodies (tBsAbs) were analyzed. For GITR+CF2 and GITR-CF2 cell (negative control) seeding, 1,000 cells per well were added in 200 μL of 1% DNEM medium and were incubated overnight to allow attachment. On the following day, the cells were fixed with 100 μL of Acetone-Methanol solution (1:1 ratio) and incubated for 20 minutes at RT. The Acetone-Methanol solution was aspirated from the plate and the cells were washed three times with 1×PBS. The general assay procedure and development was performed according to the protocol for ELISA mentioned in chapter 2.6.2. The primary antibodies αGITR1-αPD-L1 and αGITR10-αPD-L1 were tested in variable concentrations. The tBsAbs were serially diluted by one third in 1× incubation buffer; 3.33 mg/mL being the highest concentration and 0.0411 mg/mL the lowest. Several controls were set-up and are listed on the table below (Table 3).

TABLE 3
Experimental Overview on tested samples and controls for
cell based ELISA of αGITR1-αPD-L1 and αGITR10-
αPD-L1 on GITR+CF2 cells (“6xHis” disclosed as SEQ ID NO: 1084)

| | Test- | Primary | Secondary | | Expected |
|---|---|---|---|---|---|
| Antigen | Type | AB | AB | Purpose | signal |
| GIRT⁺CF2 | Sample | αGITR1- | Anti | Sample | Positive |
| | | αPD-L1 | 6xHis-HRP | test | |
| | | | (Thermo- | | |
| | | | scientific) | | |
| | | αGITR10- | Anti | Sample | Positive |
| | | αPD-L1 | 6xHis-HRP | test | |
| | | | (Thermo- | | |
| | | | scientific) | | |
| | | F10- | Anti | Negative | Negative |
| | | αPDL1 | 6xHis-HRP | control | |
| | | | (Thermo- | | |
| | | | scientific) | | |
| | Control | No | Anti | Unspecific | Negative |
| | | | 6xHis-HRP | binding | |
| | | | (Thermo- | | |
| | | | scientific) | | |
| GITR⁻ CF2 | Sample | αGITR1- | Anti | Sample | Negative |
| | | αPD-L1 | 6xHis-HRP | test | |
| | | | (Thermo- | | |
| | | | scientific) | | |
| | | αGITR10- | Anti | Sample | Negative |
| | | αPD-L1 | 6xHis-HRP | test | |
| | | | (Thermo- | | |
| | | | scientific) | | |
| | | F10- | Anti | Sample | Negative |
| | | αPDL1 | 6xHis-HRP | | |
| | | | (Thermo- | | |
| | | | scientific) | | |
| | Control | No | Anti | Unspecific | Negative |
| | | | 6xHis-HRP | binding | |
| | | | (Thermo- | | |
| | | | scientific) | | |

[0209] After evaluating the results of the cell-based ELISA (FIG. 20), the experiment for a second cell-based ELISA was repeated using the same procedure to that described above, except that cells were fixed with 8% paraformaldehyde.

[0210] A third cell based ELISA was performed to compare αGITR10-αPD-L1 tBsAb to the commercial human αGITR mAb. For GITR+CF2 and GITR CF2 cell (negative control) seeding, 10,000 cells per well were added in 200 μL of 1% DMEM medium and were incubated overnight to allow attachment. On the following day, the cells were fixed with 100 μL of 8% paraformaldehyde and incubated for 20 minutes at RT. The paraformaldehyde solution was aspirated from the plate and the cells were washed three times with 1×PBS. The general assay procedure and development was performed according to the protocol for ELISA mentioned herein. The primary antibodies αGITR10-αPD-L1 and αGITR mAb were tested in variable concentrations. The antibodies were serially diluted (1:2) in 1× incubation buffer; 5 mg/mL being the highest concentration and 0.078 mg/mL the lowest. Several controls were set-up and are listed on the table below (Table 4).

TABLE 4
Experimental Overview on tested samples and controls
for cell based ELISA of αGITR10-αPD-L1 and αGITR
mAb on GITR+CF2 cells

| | Test- | Primary | Secondary | | Expected |
|---|---|---|---|---|---|
| Antigen | Type | AB | AB | Purpose | signal |
| GITR⁺CF2 | Sample | αGITR10- | His-HRP | Sample | Positive |
| | | αPD-L1 | | test | |
| | | Commercial | Goat anti- | Standard | Positive |
| | | GITR mAb | mouse | | |
| | | (Purified | IgG | | |
| | | anti-hu | Fc, HRP | | |
| | | CD357)(Bio- | conjugate | | |
| | | legend) | (Thermo- | | |
| | | | scientific) | | |
| | | F10- | His-HRP | Control | Negative |
| | | αPDL1 | | | |
| | Control | No | His-HRP | Measure | Negative |
| | | | | unspecific | |
| | | | | binding | |
| | | No | Goat anti- | Measure | Negative |
| | | | mouse | unspecific | |
| | | | IgG | binding | |
| | | | Fc, HRP | | |
| | | | conjugate | | |
| | | | (Thermo- | | |
| | | | scientific) | | |
| GITR⁻ CF2 | Sample | αGITR10- | His-HRP | Sample | Negative |
| | | αPD-L1 | | test | |
| | | Commercial | Goat anti- | Standard | Negative |
| | | GITR mAb | mouse | | |
| | | (Purified | IgG | | |
| | | anti-hu | Fc, HRP | | |
| | | CD357)(Bio- | conjugate | | |
| | | legend) | (Thermo- | | |
| | | | scientific) | | |
| | | F10- | His-HRP | Control | Negative |
| | | αPDL1 | | | |
| | Control | No | His-HRP | Measure | Negative |
| | | | | unspecific | |
| | | | | binding | |
| | | No | Goat anti- | Measure | Negative |
| | | | mouse | unspecific | |
| | | | IgG | binding | |
| | | | Fc, HRP | | |
| | | | conjugate | | |
| | | | (Thermo- | | |
| | | | scientific) | | |

[0211] The fourth ELISA was performed to compare αGITR10-αPD-L1 with CH2 tBsAb to the commercial αGITR mAb. The assay procedure was identical to the third ELISA (mentioned above).

### Flow Cytometry Analysis for αGITR1-αPD-L1 & αGITR10-αPD-L1

[0212] The biological activity of αGITR on GITR+CF2 cells was analyzed by means of fluorescence-activated cell sorting FACS analysis. The cells GITR+CF2 cells and GITR-CF2 were grown in a 75 cm² flask (Cellstar) until they reached roughly 80% confluence. They were detached by adding 1:10 diluted Trypsin with 0.25% Trypsin-EDTA (Life Technologies) in PBS and resuspended and then added to 96-well round bottom plate in FACS buffer (PBS, 1% FBS, 2 mM EDTA). In the following step the αGITR1-αPD-L1 and αGITR10-αPD-L1 were added at variable concentrations for 1 hour at 4° C. The highest concentration of antibody tested was at 100 μg/mL and then serially diluted in a two-fold manner until the 0.05 μg/mL dilution. The primary antibodies were detected with His Tag Alexa Fluor 488-conjugated (Biotechne). The secondary antibody was diluted in PBS (Life Technologies) and added to each well for 30 minutes. The cells were then washed three times with PBS buffer and resuspended in FACS buffer. In total 10,000 events were analyzed with FACSCalibur. Results were analyzed by FlowJo 10.1 software. Several controls were performed and are listed in the table below. (Table 5)

TABLE 5
Experimental Overview on control samples for
FACS analysis of αGITR1-αPD-L1α and
GITR10-αPD-L1 on GITR+CF2 cells and GITR−CF2 cells.

| | Test- | Primary | Secondary | | Expected |
|---|---|---|---|---|---|
| Antigen | Type | AB | AB | Purpose | signal |
| GITR⁺CF2 | Control | none | Alexa | Unspecific | negative |
| | | | 488; | binding of | |
| | | | anti- | secondary | |
| | | | His | AB | |
| | | | (APC) | | |
| | | F10- | Alexa | Exclude | negative |
| | | αPD-L1 | 488; | the PD-L1 | |
| | | | anti- | binding to | |
| | | | His | GITR+ | |
| | | | (APC) | CF2 | |
| | | αGITR1 | Anti- | Verify that | positive |
| | | mAb | human | αGITR | |
| | | | IgG Fc | arm can | |
| | | | (FITC) | recognize | |
| | | | | the GITR | |
| | | | | binding | |
| | | | | site | |
| | | none | Anti- | Unspecific | negative |
| | | | human | binding of | |
| | | | IgG Fc | secondary | |
| | | | (FITC) | | |
| | | Commercial | Anti- | Verify that | positive |
| | | mouse | mouse | CF2 cells | |
| | | αGITR | IgG Fc | are | |
| | | IgG | (FITC) | expressing | |
| | | | | GITR | |
| | | none | Anti- | Unspecific | negative |
| | | | mouse | binding of | |
| | | | IgG Fc | secondary | |
| | | | (FITC) | | |
| GITR⁻ CF2 | Control | none | Alexa | Unspecific | negative |
| | | | 488; | binding of | |
| | | | anti-His | secondary | |
| | | | (APC) | | |
| | | F10- | Alexa | Exclude | negative |
| | | αPD-L1 | 488; | the PD-L1 | |
| | | | anti- | binding to | |
| | | | His | GITR+ | |
| | | | (APC) | CF2 | |
| | | αGITR1 | Anti- | Verify that | negative |
| | | IgG | human | αGITR | |
| | | | IgG Fc | arm binds | |
| | | | (FITC) | specif- | |
| | | | | ically | |
| | | | | to GITR+ | |
| | | | | CF2 cells | |

### Example 5: Functional Studies

ADCC Assay of αGITR-αPDL1 with CH2 on GITR+CF2 Cells

[0213] The antibody-dependent cell-mediated cytotoxicity of αGITR-αPD-L1 with CH2 on GITR+CF2 cells was analyzed using ADCC Reporter Bioassay Complete Kit (WIL2-S) (Promega) and implemented according to the manufacturers protocol. The aim was to test the αGITR10-αPD-L1 with CH2 for ADCC. The assay was performed using ADCC reporter cells (WIL2-S) that have Fcγ receptors and the response element-driven luciferase gene.

[0214] The cells GITR+CF2 cells and GITR-CF2 were grown in a 75 cm² flask (Cellstar) until they reached roughly 80% confluence. They were detached by adding 1:10 diluted 0.25% Trypsin-EDTA (Life Technologies) in PBS and tested for viability. The GITR+CF2 cells were used as target cells and plated in 96-well cell flat bottom microplate (PerkinElmer) at a density of 2×10⁴ cells per well diluted in RPMI 1640 medium (Life Technologies®; serum free). The αGITR10-αPD-L1 (with CH2) and the controls (αGITR10-IgG (positive control) and GITR10-PD-L1 and F10-PDL1 (negative control) were serially diluted in ADCC assay medium. The four antibodies were added in a concentration-dependent manner, starting at 20 mg/mL (highest concentration), followed by 2 mg/mL, 0.2 mg/mL and 0.02 mg/mL, respectively (1:10 serial dilution) and incubated for 5 minutes at RT. Following incubation, the effector cells WIL2-S were suspended in ADCC assay medium and added to the target cell/antibody mixture at 10×10⁶ cells per well. The ratio of effector cells to target cells was set up as 5:1 (E/T). After approximately a 6 hour incubation at 37° C. (5% CO₂), an equal volume of the Bio-Gio Luciferase assay reagent (Promega) was added to the wells and incubated (RT, 10 min). The luminescence of the cells was measured using Polarstar Omega. Assays were performed in triplicate. All data were plotted using Excel.

CDC Assay of αGITR-α-PDL1 with CH2 on GITR+CF2 Cells

[0215] For the testing of complement-dependent cytotoxicity (CDC) of the αGITR10-α-PDL1 with CH2 tBsAb, baby rabbit complement (Cedarlane Laboratories) was used in the CellTox™ Green Cytotoxicity assay (Promega) using CellTox Green Dye (Promega) that binds DNA in comprised cells. The fluorescent signal produced by the dye binding to the dead-cell DNA is proportional to cytotoxicity. The assay was performed according the manufacturers protocol. The experimental procedure and set-up for the testing of complement-dependent cytotoxicity was similar to the CDC test mentioned above, with exception of the assay development and analysis which was performed with the CellTox™ Green Cytotoxicity assay (Promega). The antibodies tested for complement-dependent cytotoxicity were the αGITR10-αPDL1 and the αGITR10-α-PDL1 with CH2 tetrameric bispecific antibodies (tBsAbs). The αGITR mAb was used for positive control and the F10-αPD-L1 was used as negative control.

[0216] After approximately a 4 hour incubation at 37° C. (5% CO₂) an equal volume of CellTox Green Dye assay reagent (Promega) was added to the wells and incubated (RT, 10 min). The fluorescence was measured using Polarstar Omega. Assays were performed in triplicate. All data were plotted using Excel.

### Example 6: Isolation and Characterization of the αGITR-αPD-L1 BsAbs

### Generation of Expression Vector

[0217] In total six vectors (αGITR-αPD-L1) were constructed to produce the desired tBsAbs and additional three vectors for the production of control Abs (αGITR1-F10, αGITR10-F10 and F10-αPD-L1). The expression vector was generated according to the cloning strategy described above.

[0218] The recipient expression vector pcDNA 3.4 and all donor vectors (six V_{H}GITR-linker-V_{L}GITR and inserts and one V_{H}F10-V_{L}F10 insert) were digested with SfI and NotI restriction enzymes and the fragments were separated on a 1% agarose gel, stained with ethidium-bromide. The SfI and NotI digestion patterns of the seven digestions were in agreement with the theoretically calculated values. The digested recipient vector pcDNA 3.4 vector comprises 7500 bp and can be detected at the correct level (lane 1; 8000 bp) of the ladder. The smaller fragment in lane 1 displayed between 500 and a 1000 bp and corresponds to V_{H}^{X}-linker-V_{L}^{X} of a previously-used scFv. The GITR inserts (lanes 2-6) and the F10 insert (lane 7) were clustered between 500 and 1000 bp. The larger bands seen at the level of 8000 bp (lanes 2-7) represent the corresponding descendent vectors.

[0219] Two additional control plasmids (2) and (3) were constructed. The recipient expression vectors pcDNA3.4 encoding the αGITR1-αPDL1 and αGITR10-αPDL1 scFvs were digested with BsiWI and BamHI Res to replace the V_{H}PD-L1-linker-V_{L}PD-L1 fragment with V_{H}F10-linker-V_{L}F10 fragment. To isolate the V_{H}F10-linker-V_{L}F10 fragment from the pcDNA3.1 donor vector, a forward and a reverse primer (No. 1 and No. 2) were designed, containing the BsiWI and BamHI restriction site. After isolating the cDNA using PCR, it was digested with BsiWI and BamHI RE. The gel analyses of all 3 digestions were consistent with the theoretical number. As anticipated the PCR of F10 fragment only shows one band at the correct position relative to the ladder. The two digested recipient vectors (containing V_{H}GITR1-V_{L}GITR1 or V_{H}GITR10-V_{L}GITR10, respectively) are approximately 8000 bp in size and match the theoretical size of the vector (7500 bp).

[0220] All digested fragments were extracted and purified form the agarose gel and the respective ligation reactions were performed. The yielded plasmids were successfully constructed and confirmed by sequencing (Genewiz).

[0221] Expression of GITR-PDL1 bispecific Antibodies and αGITR-IgG The αGITR-αPD-L1 proteins were expressed in 293F HEK cells and isolated via Ni-NTA purification. The αGITR IgG protein was expressed in HEK 293F cells and isolated via Protein A purification. The yields measured by NanoDrop spectrophotometer are listed in table 6.

TABLE 6
Antibody yield of 293F HEK expression

| | Yield per | | per |
|---|---|---|---|
| | 300 mL | | 300 mL |
| | cell culture | | cell culture |
| Antibody | [mg] | Antibody | [mg] |
| αGITR1-αPD-L1 | 3.3 | αGITR17-αPD-L1 | 2.5 |
| αGITR10-αPD-L1 | 5.5 | F10-αPD-L1 | 1.1 |
| αGITR11-αPD-L1 | 2.8 | αGITR1-F10 | 1.4 |
| αGITR14-αPD-L1 | 1.7 | αGITR10-F10 | 1.5 |
| αGITR15-αPD-L1 | 2.7 | αGITR IgG | 2.9 |

### SDS-PAGE Analysis

[0222] The purity of the tBsAbs αGITR1-αPDL1, αGITR10-αPDL1, αGITR11-αPDL1, αGITR14-αPDL1, αGITR15-αPDL1, αGITR17-αPDL1 and F10-αPD-L1 were analyzed by SDS-PAGE. Between 3 μg-5 μg of protein sample was loaded on the gel, separated electrophoretically and stained with Coomassie blue.

[0223] Notable, under non-reducing conditions, there are two bands that particularly draw attention. The upper band lies within the 115 kDa and 140 kDa range. The quantitative predominance of this band in each of the protein profiles and the proximity of its apparent molecular size to that of the αGITR-αPD-L1 tetrameric bispecific antibodies (tBsAbs) (130 kDa) indicate successful antibody production. The lower band lies between 70 and 80 kDa and thus, may account for a substantial amount of monomeric tandem scFv (65 kDa). Apart from this, some weaker bands above 140 kDa are observable, suggesting the formation of aggregates.

[0224] Under reducing conditions, only one band can be seen between 70 and 80 kDa, which suggests the disulfide bond reduction of tBsAbs into tandem scFv (65 kDa). Deviating molecular weights between apparent and theoretical calculated values can stem from post-translational modifications (such as glycosylation and phosphorylation) as well as protein conformation as it is running through the SDS PAGE. Differences amounts loaded onto the gel can account for differences in the intensity of the bands between the αGITR-αPD-L1 tBsAbs.

[0225] Further, the purity of the αGITR-IgG was also analyzed by SDS-PAGE. Under non-reducing conditions, the analysis exhibited one band with an apparent molecular weight of 140 kDa and is approximate equal to the theoretical calculated molecular weight of an αGITR IgG (150 kDa). The reduced SDS analysis revealed two bands, which proposes the successful disulfide bond reduction of the αGITR IgG resulting in heavy chain (50 kDa) and light chain (25 kDa).

### Direct ELISA of αGITR-αPD-L1 BsAbs on Passively Adsorbed PD-L1 Antigen

[0226] Direct ELISA of the αGITR-αPD-L1 BsAbs was performed to characterize their reactivity to the PD-L1 antigen. As shown in FIG. 19, reactivity to PD-L1 antigen could be observed in all αGITR-αPD-L1 tBsAbs, while no unspecific stickiness to CCR4 was seen (not shown). The readout signal was very similar for all αGITR-αPD-L1 tBsAbs at all concentrations. Highest ELISA signals were measured at highest concentrations. In addition the absorbance value of αGITR-αPD-L1 tBsAbs binding was comparable to that for the commercial αPD-L1 mAb and the intensity signal decreased with lower concentrations. The ELISA does not show saturation at the higher concentration and has very weak signal at concentrations below 0.01 mg/mL.

Cell-Based ELISA of αGITR-αPD-L1 tBsAbs on GITR+CF2

[0227] In previous studies of αGITR IgGs, αGITR1 IgG and αGITR10 IgG were proven to have the best characteristics, which is why the project here was narrowed down the following experiments to αGITR10-αPD-L1 and αGITR1-αPD-L1 tBsAbs. The cell based enzyme-linked immunosorbent assay (ELISA) was used to test the αGITR1-αPD-L1, αGITR10-αPD-L1 at different concentrations against GITR+CF2 cells to analyze their reactivity. As shown in FIG. 20, reactivity to GITR+CF2 could be observed for αGITR1-αPD-L1 and αGITR10-αPD-L1 antibodies. The OD value of αGITR1-αPD-L1 and αGITR10-αPD-L1 depend on their respective concentrations. Consistent with the expectations, the stronger signal was measured at the higher concentration; then gradually diminished as the concentration decreased.

[0228] The signal intensity of αGITR10-αPD-L1 is superior to that by αGITR1-αPD-L1 at all concentrations. Surprisingly, the negative control F10-αPD-L1 antibody not only shows absorbance but also seems to behave in a concentration-dependent manner. For αGITR1-αPD-L1 and F10-αPD-L1, no readout signal was detected below the threshold of 0.1235 mg/mL. Overall, the standard deviations of the mean were exceptionally high.

[0229] Due to the surprising results of the previous ELISA (see FIG. 20), the experiment was repeated. The set-up remained identical, with the exception that the GITR+CF2 cells were fixed with 8% paraformaldehyde instead of acetone-methanol solution. Results of this second approach revealed similar signal readout observations of αGITR1-αPD-L1 and αGITR10-αPD-L1 antibodies, but with slightly higher absorption values (See, FIG. 21). However, the F10-αPD-L1 antibody continues to display signal activity and its absorbance is still dependent on the concentration used. The tBsAbs showed no binding when incubated with GITR-CF2 cells. See, FIG. 32.

[0230] A third cell-based ELISA was performed to compare αGITR10-αPD-L1 antibody to a commercial αGITR IgG. Reactivity of both antibodies was observed in GITR+CF2 cells (FIG. 22) but not GITR-CF2 cells (See, FIG. 33). Again, the results of the αGITR10-αPD-L1 matched previous recorded data. The signal intensity of the αGITR mAb is superior to that by αGITR10-αPD-L1 at all concentrations. Surprisingly, at higher concentrations, no saturation of the signal readout could be observed. The control antibody F10-αPD-L1 (neg. control) showed concentration-dependent signal activity for GITR+CF2 cells but not for CF2 cells (without GITR+ expression). See, FIG. 33.

### Flow Cytometry Analysis of αGITR-αPD-L1 BsAbs on GITR+ Cells

[0231] Flow cytometry analysis assesses the binding of αGITR1-αPD-L1 and αGITR10-αPD-L1 antibodies to GITR+CF2 cells (FIGS. 23 and 24). The results show, that both antibodies (co-stained with an APC-labeled His-Tag Alexa Fluor 488) can bind specifically the GITR+CF2. Further, the tBsAbs had no reactivity against GITR-CF2 (FIG. 34) Note that some non-specific binding is caused by the secondary antibodies as shown in the controls (FIG. 34). The comparison of the two antibodies to each other shows that they display similar binding under the identical conditions. Therefore, only the αGITR10-αPD-L1 tBsAb was selected for further characterization. The standard measurement of the αGITR1 IgG and αGITR10 IgG revealed similar binding properties when compared to the tBsAbs.

### Example 7: Isolation and Characterization of αGITR-αPD-L1 with CH2 bsAb

### Generation of Bacterial Expression Vector

[0232] In previous studies, the αGITR10 mAb was proven to exhibit the best characteristics, which is why αGITR10-αPD-L1 was chosen as the expression vector for the engineering of the new construct containing a CH2 domain. The vector was generated according to the cloning strategy described above, resulting in the gene order V_{H}GITR-linker-V_{L}GITR-linker-hinge-CH2-linker-V_{H}PD-L1-linker-V_{L}PD-L1.

[0233] Site-directed mutagenesis enabled introduction of a HindIII restriction site into the recipient pcDNA 3.4 vector between the IgG1 Hinge region and the linker (GGGGS)₆. (SEQ ID NO: 1909) After transformation into E. coli strain XL10-Gold® Ultracompetent cells, 16 clones were picked then underwent DNA purification. A restriction enzyme digestion analysis using HindIII and BamHI restriction enzymes, displayed on a 1% agarose gel, tested for the correct introduction of HindIII restriction site (See FIG. 25). Of the 16 clones, only clone No. 10 showed two bands. The size of the smaller band clustered between 500 and 1000 bp, corresponds to the theoretical size of HindIII and BamHI digestion (800 bp). Since HindIII and BamHI represent unique restriction sites in the plasmid, this result indicated a successful introduction of HindIII into the DNA of cells in clone No. 10.

[0234] An additional gel analysis of clone No. 10 was undertaken to compare it to the original GITR10-PDL1 (that does not contain the HindIII restriction site); see FIG. 26. Clone No. 10 (GITR10-PDL1 with HindIII) and GITR10-PDL1 (without HindIII) each individually underwent three digestions. The first digestion was performed with only HindIII restriction enzyme, a second one with only NotI restriction enzyme and a third digestion with both HindIII and NotI restriction enzymes. The digestions of clone No. 10 with a single enzyme resulted in open-circular conformation and were clustered around 8000 bp. In contrast, the double digestion of clone No. 10 with HindIII and NotI restriction enzymes resulted in two bands. The lower band is clustered below 500 bp and corresponds to the theoretical calculated value for the HindIII/NotI digestion fragment (117 bp). The αGITR10-αPD-L1 plasmid does not contain a HindIII restriction site, which is why the gel analysis of HindIII single digestion revealed, as anticipated, the supercoiled plasmid DNA. These results strongly suggest the correct introduction of the HindIII restriction site.

[0235] The sequencing results (Genewiz) of clone No. 10 confirmed the correct introduction of HindIII between the hinge and the linker domain. However, deletion of five linker-repeats of the total six (GGGGS (SEQ ID NO: 1484)) repeats occurred during site directed mutagenesis. The new construct consequently exhibited only one repeat of the linker sequence rather than six linker repeats. Nevertheless, it was decided to continue plasmid construction with this new created plasmid containing a hinge region followed by one single linker repeat (GGGGS (SEQ ID NO: 1484))

[0236] Two primers (forward and reverse) were designed to isolate the CH2 domain from an IgG1 plasmid. Each primer included a HindIII restriction site. The recipient vector GITR10-PDL1 (containing the HindIII site) and the CH2 fragment were single digested with the HindIII restriction enzyme and analyzed in a 1% agarose gel (FIG. 27). Both digestions resulted in a fragment size that matches the theoretical calculated values: 7.5 bp for the recipient vector GITR10-PDL1 with HindIII and 350 bp for the CH2 fragment.

[0237] Therefore, the pcDNA 3.4 expression vector αGITR10-αPD-L1 with CH2 was successfully constructed and confirmed by sequencing (Genewiz).

### SDS-PAGE Analysis

[0238] The αGITR10-αPD-L1 with CH2 protein was expressed in 293T HEK cells and isolated via Ni-NTA purification. A total of 100 mL culture media resulted in 200 ng protein yield (NanoDrop analysis). The purity of the GITR10-PDL1 with CH2 tBsAb was analyzed by SDS-PAGE (FIG. 28). In total 3 μg of protein sample was loaded on the gel, separated electrophoretically and stained with Coomassie blue. Notable, under non-reducing conditions there are two bands that particularly draw attention. The upper band lies slightly above 140 kDa. The quantitative predominance of this band and the proximity of its apparent molecular size to that of the αGITR10-αPD-L1 with CH2 tBsAb (150 kDa) propose the successful antibody production. The lower band has an apparent molecular weight of 80 kDa and thus, may account for a substantial amount of tandem scFv containing the CH2 (75 kDa) that did not dimerize. Under reducing conditions only one band can be seen at 80 kDa, which suggests that the disulfide bond reduction of the tBsAb into tandem scFv (75 kDa).

Cell-Based ELISA of αGITR-αPD-L1 with CH2 Tetrameric Bispecific Antibody (tBsAb) on GITR⁺ CF2

[0239] The cell-based enzyme-linked immunosorbent assay (ELISA) was performed to test the αGITR10-αPD-L1 with CH2 at different concentrations against GITR+CF2 to analyze their signal intensity.

[0240] As shown in FIG. 29, reactivity to GITR+CF2 could be observed in αGITR10-αPD-L1 with CH2 antibodies, while no unspecific stickiness to GITR-CF2 was noted; see FIG. 35. The OD value of αGITR10-αPD-L1 with CH2 depends on their respective concentrations. Consistent with the expectations, the strongest signal was measured at the highest concentration; then gradually diminished as the concentration decreased. The signal intensity of the αGITR IgG is superior to that of αGITR10-αPD-L1 with CH2 at most concentrations. Surprisingly, at higher concentrations, no saturation of the signal readout could be observed. The control antibody (F10-αPD-L1) was tested at highest concentration (5 μg/mL) and had, as previously seen (FIGS. 22 and 21), some reactivity.

### Example 8: Functional Studies of αGITR-αPD-L1 with CH2 BsAb

[0241] In an initial attempt to establish functional data, complement-dependent cytotoxicity (CDC) and antibody dependent cellular cytotoxicity (ADCC) was tested for the αGITR-αPD-L1 with CH2 BsAbs. However, the results were inconclusive.

ADCC Reporter Assay of αGITR-αPD-L1 with CH2 BsAb on GITR+ CF2

[0242] The αGITR10-αPD-L1 with CH2 BsAb was tested for ADCC activity using GITR+CF2 cells (target cells) and the WIL2-S (effector cells) (E/T=5:1). Antibody biological activity in ADCC was quantified through the luciferase produced as a result of NFAT pathway activation and its activity in the effector cell was quantified with luminescence readout. In the ADCC analysis, the αGITR10-αPD-L1 and αGITR10-αPD-L1 with CH2 displayed surprising results (FIG. 30). The negative control F10-αPD-L1 displayed similar signal intensity for ADCC compared to solely target and effector cells and is unbiased to variable concentrations. The positive control αGITR IgG on the other hand, exhibited, as expected, increasing values with higher concentrations. Surprisingly, for the αGITR10-αPD-L1 and αGITR10-αPD-L1 with CH2 the ADCC signal intensity decreased with higher concentrations and was substantially lower than the signal of solely target and effector cells at 20 μg/mL tBsAbs.

[0243] The ADCC activity of ααGITR10-αPD-L1 with CH2 and was measures at variable concentrations. All antibodies were serially diluted (1:2), starting the highest concentration at 20 mg/mL until 0.02 mg/mL and tested against 20,000 GITR+CF2 cells per well. The ratio of effector cells (GITR+CF2) to target cells (Wils-2) was 5:1. The αGITR IgG represents the positive control and F10-αPD-L1 the negative control. The vertical axis represents the raw value of luciferase activity in the effector cell quantified with luminescence readout. Each sample was run in triplicates at every concentration; the mean standard deviation is indicated in brackets. The background of GITR+CF2 cells in RPMI medium was subtracted from the obtained values.

CDC Analysis of αGITR10-αPD-L1 BsAb with CH2 on GITR+CF2 Cells

[0244] The αGITR10-αPD-L1 with CH2 antibody was tested for complement-dependent cytotoxicity against CF2 cells expressing the GITR by measuring the amount of fluorescent CellTox Green bound to comprised DNA. The percentage of lysis is calculated as the ratio of the intensity of the signal obtained from the sample, to the intensity of the signal from fully lysed GITR+CF2 cells (FIG. 31).

[0245] The negative control F10-αPD-L1 BsAb displayed similar percentages of cytotoxicity as the positive control αGITR IgG. αGITR10-αPD-L1 with CH2 exhibited similar cytotoxicity levels at all concentrations ranging between 65% and 70% and did not appear to be concentration dependent. Neither of the measured antibodies had a substantial higher percentage of cellular cytotoxicity. These findings largely contradict the expected outcome; a possible reason for these incongruities is a potentially low viability of the used GITR+CF2 cells.

### OTHER EMBODIMENTS

[0246] While the invention has been described in conjunction with the detailed description thereof, the foregoing description is intended to illustrate and not limit the scope of the invention, which is defined by the scope of the appended claims. Other aspects, advantages, and modifications are within the scope of the following claims.

We claim:

1. A tetravalent antibody molecule,
wherein the tetravalent antibody is a dimer of a bispecific scFv fragment, thereby providing a tetravalent antibody molecule comprising four antigen binding sites,
wherein the bispecific scFv fragment comprises a first binding site for a first antigen, a second binding site for a second antigen, and a linker-hinge-linker domain, wherein the two binding sites are joined together via the linker-hinge-linker domain,
wherein the linker-hinge-linker domain consists of an IgG1 immunoglobulin hinge region amino acid sequence according to the sequence of EPKSCDKTHTCPPCP (SEQ ID NO:1902) flanked by a flexible linker amino acid sequence at both termini,
wherein the flexible linker amino acid sequence independently comprises the amino acid sequence of (GGGS)_{X=1-6} (SEQ ID NO: 1906), (GGGGS)_{X=1-6} (SEQ ID NO: 1907), or GSAGSAAGSGEF (SEQ ID NO: 1908).

2. The tetravalent antibody molecule of claim 1, wherein the scFv fragment is a tandem scFv.

3. The tetravalent antibody molecule of claim 1, wherein the linker domain comprises an immunoglobulin hinge region amino acid sequence.

4. (canceled)

5. (canceled)

6. (canceled)

7. The tetravalent antibody molecule of claim 1 wherein the linker domain comprises at least a portion of an immunoglobulin Fc domain.

8. The tetravalent antibody molecule of claim 7, wherein the Fc domain is an IgG1, an IgG2, an IgG3, or an IgG4 Fc domain.

9. The tetravalent antibody molecule of claim 7, wherein the at least a portion of an immunoglobulin Fc domain is a CH2 domain.

10. The tetravalent antibody molecule of claim 7, wherein the Fc domain is linked to the C-terminus of the immunoglobulin hinge region amino acid sequence.

11. (canceled)

12. (canceled)

13. (canceled)

14. A nucleic acid construct encoding the tetravalent antibody molecule of claim 1

15. (canceled)

16. (canceled)

17. (canceled)

18. (canceled)

19. (canceled)

20. (canceled)

21. (canceled)

22. (canceled)

23. A vector comprising the nucleic acid construct of claim 14.

24. A host cell comprising the vector of claim 23.

25. The host cell of claim 24, wherein the cell is a T-cell, a B-cell, a follicular T-cell, or an NK-cell.

26. A chimeric antigen receptor (CAR) comprising an intracellular signaling domain, a transmembrane domain and an extracellular domain comprising the tetravalent antibody molecule of claim 1.

27. The CAR of claim 26, wherein the transmembrane domain further comprises a stalk region positioned between the extracellular domain and the transmembrane domain.

28. The CAR or claim 26, wherein the transmembrane domain comprises CD28.

29. The CAR of claim 26, further comprising one or more additional costimulatory molecules positioned between the transmembrane domain and the intracellular signaling domain.

30. The CAR of claim 29, wherein the costimulatory molecules is CD28, 4-1BB, ICOS, or OX40.

31. The CAR of claim 26, wherein the intracellular signaling domain comprises a CD3 zeta chain.

32. A genetically engineered cell which expresses and bears on the cell surface membrane the chimeric antigen receptor of claim 26.

33. The genetically engineered cell of claim 32, wherein the cell is a T-cell or an NK cell.

34. The genetically engineered cell of claim 33, wherein the T cell is CD4+, CD8+, or a mixed population of CD4+ and CD8+ cells.

35. (canceled)

36. A method for treating a disease or disorder comprising administering the tetravalent antibody molecule of claim 1.

37. The method of claim 36, wherein the disease or disorder is a CNS-related disease or disorder.

38. The method of claim 37, wherein the CNS-related disease or disorder is a CNS cancer.

39. The method of claim 38, wherein the CNS cancer is a Glioblastoma (GBM).

40. The method of claim 37, wherein the CNS-related disease or disorder is a neurodegenerative disease.

41. The method of claim 40, wherein the neurodegenerative disease is Amyotrophic Lateral Sclerosis, Parkinson's Disease, Alzheimer's Disease, or Huntington's Disease.

42. (canceled)

43. (canceled)

44. (canceled)

45. The antibody molecule of claim 1, wherein the first binding site comprises an antibody or antibody fragment specific for GITR and wherein the second binding site comprises an antibody or antibody fragment specific for PD-L1.

46. The antibody molecule of claim 45, wherein the antibody or antibody fragment specific for GITR comprises:
a VH amino acid sequence according to SEQ ID NO: 1362 and a VL amino acid sequence according to SEQ ID NO: 1364;
a VH amino acid sequence according to SEQ ID NO: 1366 and a VL amino acid sequence according to SEQ ID NO: 1368;
a VH amino acid sequence according to SEQ ID NO: 1371 and a VL amino acid sequence according to SEQ ID NO: 1372;
a VH amino acid sequence according to SEQ ID NO: 1382 and a VL amino acid sequence according to SEQ ID NO: 1376;
a VH amino acid sequence according to SEQ ID NO: 1378 and a VL amino acid sequence according to SEQ ID NO: 1380;
a VH amino acid sequence according to SEQ ID NO: 1382 and a VL amino acid sequence according to SEQ ID NO: 1384;
a VH amino acid sequence according to SEQ ID NO: 1386 and a VL amino acid sequence according to SEQ ID NO: 1388;
a VH amino acid sequence according to SEQ ID NO: 1390 and a VL amino acid sequence according to SEQ ID NO: 1392;
a VH amino acid sequence according to SEQ ID NO: 1394 and a VL amino acid sequence according to SEQ ID NO: 1396;
a VH amino acid sequence according to SEQ ID NO: 1399 and a VL amino acid sequence according to SEQ ID NO: 1400; or
a VH amino acid sequence according to SEQ ID NO: 1402 and a VL amino acid sequence according to SEQ ID NO: 1404; and
wherein the antibody or antibody fragment specific for PD-L1 comprises:
a VH amino acid sequence according to SEQ ID NO: 970 and a VL amino acid sequence according to SEQ ID NO: 971;
a VH amino acid sequence according to SEQ ID NO: 1486 and a VL amino acid sequence according to SEQ ID NO: 1488;
a VH amino acid sequence according to SEQ ID NO: 1490 and a VL amino acid sequence according to SEQ ID NO: 1492;
a VH amino acid sequence according to SEQ ID NO: 1494 and a VL amino acid sequence according to SEQ ID NO: 1496;
a VH amino acid sequence according to SEQ ID NO: 1498 and a VL amino acid sequence according to SEQ ID NO: 1500;
a VH amino acid sequence according to SEQ ID NO: 1502 and a VL amino acid sequence according to SEQ ID NO: 1504;
a VH amino acid sequence according to SEQ ID NO: 1506 and a VL amino acid sequence according to SEQ ID NO: 1508;
a VH amino acid sequence according to SEQ ID NO: 1510 and a VL amino acid sequence according to SEQ ID NO: 1512;
a VH amino acid sequence according to SEQ ID NO: 1514 and a VL amino acid sequence according to SEQ ID NO: 1516;
a VH amino acid sequence according to SEQ ID NO: 1518 and a VL amino acid sequence according to SEQ ID NO: 1520;
a VH amino acid sequence according to SEQ ID NO: 1522 and a VL amino acid sequence according to SEQ ID NO: 1524;
a VH amino acid sequence according to SEQ ID NO: 1526 and a VL amino acid sequence according to SEQ ID NO: 1528;
a VH amino acid sequence according to SEQ ID NO: 1530 and a VL amino acid sequence according to SEQ ID NO: 1532;
a VH amino acid sequence according to SEQ ID NO: 1534 and a VL amino acid sequence according to SEQ ID NO: 1536;
a VH amino acid sequence according to SEQ ID NO: 1538 and a VL amino acid sequence according to SEQ ID NO:1540.

47. The antibody molecule of claim 45,
wherein the antibody or antibody fragment specific for GITR comprises a VH amino acid sequence according to SEQ ID NO: 1378 and a VL amino acid sequence according to SEQ ID NO: 1380; and
wherein the antibody or antibody fragment specific for PD-L1 comprises a VH amino acid sequence according to SEQ ID NO: 1510 and a VL amino acid sequence according to SEQ ID NO: 1512.

The application's sequence listing, which the Patent Office published only in electronic form, follows.

SEQUENCE LISTING (1915 sequences)

SEQ ID NO: 1 - protein, 8 aa, synthetic construct
GGPFSSYA

SEQ ID NO: 2 - protein, 8 aa, synthetic construct
GGIFSSYA

SEQ ID NO: 3 - protein, 8 aa, synthetic construct
GGTFSSYA

SEQ ID NO: 4 - protein, 8 aa, synthetic construct
GVTFSSYA

SEQ ID NO: 5 - protein, 8 aa, synthetic construct
GVTFSSYA

SEQ ID NO: 6 - protein, 8 aa, synthetic construct
GVTFSSYA

SEQ ID NO: 7 - protein, 8 aa, synthetic construct
GGTFSSYA

SEQ ID NO: 8 - protein, 8 aa, synthetic construct
GGTFSSYA

SEQ ID NO: 9 - protein, 8 aa, synthetic construct
GGTFSSYA

SEQ ID NO: 10 - protein, 8 aa, synthetic construct
GVTFSSYA

SEQ ID NO: 11 - protein, 8 aa, synthetic construct
GVTFRSYA

SEQ ID NO: 12 - protein, 8 aa, synthetic construct
GGTFSSYA

SEQ ID NO: 13 - protein, 8 aa, synthetic construct
GGPFSSYA

SEQ ID NO: 14 - protein, 8 aa, synthetic construct
GGTFSSYA

SEQ ID NO: 15 - protein, 8 aa, synthetic construct
GGTFSSYA

SEQ ID NO: 16 - protein, 8 aa, synthetic construct
GVTFSSYA

SEQ ID NO: 17 - protein, 8 aa, synthetic construct
GVTFSSYA

SEQ ID NO: 18 - protein, 8 aa, synthetic construct
GVTFSSYA

SEQ ID NO: 19 - protein, 8 aa, synthetic construct
GGPFSSYA

SEQ ID NO: 20 - protein, 8 aa, synthetic construct
GGPFSSYA

SEQ ID NO: 21 - protein, 8 aa, synthetic construct
GVTFSSYA

SEQ ID NO: 22 - protein, 8 aa, synthetic construct
GGTFSSYA

SEQ ID NO: 23 - protein, 8 aa, synthetic construct
GGTFSSYA

SEQ ID NO: 24 - protein, 8 aa, synthetic construct
GVTFSSYA

SEQ ID NO: 25 - protein, 8 aa, synthetic construct
GVTFSSYA

SEQ ID NO: 26 - protein, 8 aa, synthetic construct
GVTFSSYA

SEQ ID NO: 27 - protein, 8 aa, synthetic construct
GGTFSSYA

SEQ ID NO: 28 - protein, 8 aa, synthetic construct
GGIFSSYA

SEQ ID NO: 29 - protein, 8 aa, synthetic construct
GGTFSSYA

SEQ ID NO: 30 - protein, 8 aa, synthetic construct
GGTFSSYA

SEQ ID NO: 31 - protein, 8 aa, synthetic construct
GGTFSSYA

SEQ ID NO: 32 - protein, 8 aa, synthetic construct
GGTFSSYA

SEQ ID NO: 33 - protein, 8 aa, synthetic construct
GGTFSSYA

SEQ ID NO: 34 - protein, 8 aa, synthetic construct
GVTFRSYA

SEQ ID NO: 35 - protein, 8 aa, synthetic construct
GGTFSSYA

SEQ ID NO: 36 - protein, 8 aa, synthetic construct
GVTFSSYA

SEQ ID NO: 37 - protein, 8 aa, synthetic construct
ISPMFGTA

SEQ ID NO: 38 - protein, 8 aa, synthetic construct
ISPIFGTA

SEQ ID NO: 39 - protein, 8 aa, synthetic construct
ISPIFGTA

SEQ ID NO: 40 - protein, 8 aa, synthetic construct
ISPIFGTA

SEQ ID NO: 41 - protein, 8 aa, synthetic construct
IMPMFGTA

SEQ ID NO: 42 - protein, 8 aa, synthetic construct
ISPLFGTA

SEQ ID NO: 43 - protein, 8 aa, synthetic construct
ISPIFGTA

SEQ ID NO: 44 - protein, 8 aa, synthetic construct
ISPIFGTA

SEQ ID NO: 45 - protein, 8 aa, synthetic construct
ISPMFGTA

SEQ ID NO: 46 - protein, 8 aa, synthetic construct
ISPIFGTA

SEQ ID NO: 47 - protein, 8 aa, synthetic construct
ISGIFGTA

SEQ ID NO: 48 - protein, 8 aa, synthetic construct
ISPMFGTA

SEQ ID NO: 49 - protein, 8 aa, synthetic construct
ISGIFGTA

SEQ ID NO: 50 - protein, 8 aa, synthetic construct
ISPIFGTA

SEQ ID NO: 51 - protein, 8 aa, synthetic construct
ISPIFGTA

SEQ ID NO: 52 - protein, 8 aa, synthetic construct
ISPMFGTA

SEQ ID NO: 53 - protein, 8 aa, synthetic construct
ITPMFGTA

SEQ ID NO: 54 - protein, 8 aa, synthetic construct
ISPLFGTA

SEQ ID NO: 55 - protein, 8 aa, synthetic construct
ISPMFGTA

SEQ ID NO: 56 - protein, 8 aa, synthetic construct
ISPLFGTA

SEQ ID NO: 57 - protein, 8 aa, synthetic construct
ISPMFGTA

SEQ ID NO: 58 - protein, 8 aa, synthetic construct
ISPLFGTA

SEQ ID NO: 59 - protein, 8 aa, synthetic construct
ISPIFGTA

SEQ ID NO: 60 - protein, 8 aa, synthetic construct
ISPIFGTA

SEQ ID NO: 61 - protein, 8 aa, synthetic construct
ISPLFGTA

SEQ ID NO: 62 - protein, 8 aa, synthetic construct
ISPIFGTA

SEQ ID NO: 63 - protein, 8 aa, synthetic construct
ISPMFGTA

SEQ ID NO: 64 - protein, 8 aa, synthetic construct
ISPIFGTA

SEQ ID NO: 65 - protein, 8 aa, synthetic construct
ITPIFGTA

SEQ ID NO: 66 - protein, 8 aa, synthetic construct
ISPIFGTA

SEQ ID NO: 67 - protein, 8 aa, synthetic construct
IIPIFGTA

SEQ ID NO: 68 - protein, 8 aa, synthetic construct
ITPMFGTA

SEQ ID NO: 69 - protein, 8 aa, synthetic construct
ISAMFGTA

SEQ ID NO: 70 - protein, 8 aa, synthetic construct
IIPIFGTA

SEQ ID NO: 71 - protein, 8 aa, synthetic construct
ITPMFGTA

SEQ ID NO: 72 - protein, 8 aa, synthetic construct
ISPMFGTA

SEQ ID NO: 73 - protein, 17 aa, synthetic construct
ARDDGYAPSGGLREFDV

SEQ ID NO: 74 - protein, 14 aa, synthetic construct
ARGRGAYMGPSMDV

SEQ ID NO: 75 - protein, 14 aa, synthetic construct
ARGARYYAGGYFDV

SEQ ID NO: 76 - protein, 18 aa, synthetic construct
ARDSGNYDGYGPGSRFDV

SEQ ID NO: 77 - protein, 14 aa, synthetic construct
ARERGSWSFGYFDV

SEQ ID NO: 78 - protein, 14 aa, synthetic construct
ARSRTYADGRTFDV

SEQ ID NO: 79 - protein, 17 aa, synthetic construct
ARELGYLAGSPSPGFDY

SEQ ID NO: 80 - protein, 14 aa, synthetic construct
ARSRRYWADGGFDY

SEQ ID NO: 81 - protein, 15 aa, synthetic construct
AREGGYSPGGVDFDY

SEQ ID NO: 82 - protein, 14 aa, synthetic construct
ARGTTYSTARYFDV

SEQ ID NO: 83 - protein, 14 aa, synthetic construct
ARSPAYYFGPNMDV

SEQ ID NO: 84 - protein, 16 aa, synthetic construct
ARSSRYAPSDSTNFDQ

SEQ ID NO: 85 - protein, 14 aa, synthetic construct
ARGDRFYVGERFDV

SEQ ID NO: 86 - protein, 18 aa, synthetic construct
ARGGGVGRIWIAGYGFDQ

SEQ ID NO: 87 - protein, 18 aa, synthetic construct
ARGPGYHPAGASGQFFDL

SEQ ID NO: 88 - protein, 16 aa, synthetic construct
ARGRGYAPDALTNFDV

SEQ ID NO: 89 - protein, 15 aa, synthetic construct
ARGRGYIAVAGDMDV

SEQ ID NO: 90 - protein, 17 aa, synthetic construct
ARGDAYYVGGGARPFDL

SEQ ID NO: 91 - protein, 18 aa, synthetic construct
ARGYSYYPGGGGGRNFDY

SEQ ID NO: 92 - protein, 17 aa, synthetic construct
ARAPTYYASRDSYNFDY

SEQ ID NO: 93 - protein, 14 aa, synthetic construct
ARDTTYIAGGHFDV

SEQ ID NO: 94 - protein, 15 aa, synthetic construct
ARASGYFTGWGTFDY

SEQ ID NO: 95 - protein, 14 aa, synthetic construct
ARGRYYYTVGVYDV

SEQ ID NO: 96 - protein, 20 aa, synthetic construct
ARGGGYSADGGAGNNTIFDV

SEQ ID NO: 97 - protein, 15 aa, synthetic construct
ARERGYTVGGGGMDV

SEQ ID NO: 98 - protein, 17 aa, synthetic construct
AREYLGDDYSSGSYFDV

SEQ ID NO: 99 - protein, 14 aa, synthetic construct
ARESGYSGTGQFDV

SEQ ID NO: 100 - protein, 15 aa, synthetic construct
ARSGGYYDYGVGYDQ

SEQ ID NO: 101 - protein, 15 aa, synthetic construct
ARSGGYSPSIGGFDV

SEQ ID NO: 102 - protein, 16 aa, synthetic construct
ARGPGYDPSSLRGFDV

SEQ ID NO: 103 - protein, 10 aa, synthetic construct
ARGEEAYYDL

SEQ ID NO: 104 - protein, 15 aa, synthetic construct
ARGTSYLPGRSGFDV

SEQ ID NO: 105 - protein, 15 aa, synthetic construct
ARGRGYDPSVGGFDV

SEQ ID NO: 106 - protein, 20 aa, synthetic construct
ARDSTPSVTSSLYRIPAFDV

SEQ ID NO: 107 - protein, 15 aa, synthetic construct
ARGPGYYPDSNNYDL

SEQ ID NO: 108 - protein, 15 aa, synthetic construct
ARGGTYSPGGTYFDV

SEQ ID NO: 109 - protein, 12 aa, synthetic construct
RSVLYSSNNKNY

SEQ ID NO: 110 - protein, 6 aa, synthetic construct
NIGSKS

SEQ ID NO: 111 - protein, 6 aa, synthetic construct
QTVSNY

SEQ ID NO: 112 - protein, 8 aa, synthetic construct
SSNIGSNT

SEQ ID NO: 113 - protein, 6 aa, synthetic construct
HIGSKS

SEQ ID NO: 114 - protein, 9 aa, synthetic construct
SSDVGGYNH

SEQ ID NO: 115 - protein, 9 aa, synthetic construct
SSDVGGYNY

SEQ ID NO: 116 - protein, 8 aa, synthetic construct
SSNMGRNT

SEQ ID NO: 117 - protein, 8 aa, synthetic construct
SGSIASTY

SEQ ID NO: 118 - protein, 8 aa, synthetic construct
SGSIASNY

SEQ ID NO: 119 - protein, 9 aa, synthetic construct
SSNIGAGYD

SEQ ID NO: 120 - protein, 8 aa, synthetic construct
SGSIASNY

SEQ ID NO: 121 - protein, 6 aa, synthetic construct
DIGSKS

SEQ ID NO: 122 - protein, 9 aa, synthetic construct
SGSVSTSNY

SEQ ID NO: 123 - protein, 8 aa, synthetic construct
SNNVGNQG

SEQ ID NO: 124 - protein, 12 aa, synthetic construct
RSLFDSSDNKNY

SEQ ID NO: 125 - protein, 12 aa, synthetic construct
RSVLYSSNNKNY

SEQ ID NO: 126 - protein, 8 aa, synthetic construct
SSNIGVNY

SEQ ID NO: 127 - protein, 8 aa, synthetic construct
SSNIGSNT

SEQ ID NO: 128 - protein, 7 aa, synthetic construct
QSVDRGY

SEQ ID NO: 129 - protein, 9 aa, synthetic construct
SSDIGAYNY

SEQ ID NO: 130 - protein, 6 aa, synthetic construct
ALPKQY

SEQ ID NO: 131 - protein, 8 aa, synthetic construct
SDNVGNQG

SEQ ID NO: 132 - protein, 8 aa, synthetic construct
NNNVGNQG

SEQ ID NO: 133 - protein, 9 aa, synthetic construct
SSDVGAHNF

SEQ ID NO: 134 - protein, 6 aa, synthetic construct
QSVDSH

SEQ ID NO: 135 - protein, 8 aa, synthetic construct
TSNVGRNT

SEQ ID NO: 136 - protein, 8 aa, synthetic construct
RSNIGSNT

SEQ ID NO: 137 - protein, 8 aa, synthetic construct
RSNIGRNT

SEQ ID NO: 138 - protein, 8 aa, synthetic construct
SNNVGNQG

SEQ ID NO: 139 - protein, 6 aa, synthetic construct
QSVSSF

SEQ ID NO: 140 - protein, 6 aa, synthetic construct
ALPKQY

SEQ ID NO: 141 - protein, 8 aa, synthetic construct
SGSIASNY

SEQ ID NO: 142 - protein, 7 aa, synthetic construct
NGPSNYI

SEQ ID NO: 143 - protein, 7 aa, synthetic construct
QSVSSSY

SEQ ID NO: 144 - protein, 8 aa, synthetic construct
SSNIGVSF

SEQ ID NO: 145-177 - skipped (33 entries)

SEQ ID NO: 178 - protein, 7 aa, synthetic construct
LNSDGSH

SEQ ID NO: 179-180 - skipped (2 entries)

SEQ ID NO: 181 - protein, 9 aa, synthetic construct
QQYYSGSWT

SEQ ID NO: 182 - protein, 11 aa, synthetic construct
QVWDRSSDHVV

SEQ ID NO: 183 - protein, 10 aa, synthetic construct
QQYDNLPPVT

SEQ ID NO: 184 - protein, 11 aa, synthetic construct
SAWDDSLGGEV

SEQ ID NO: 185 - protein, 11 aa, synthetic construct
QVWDSSNDHPV

SEQ ID NO: 186 - protein, 10 aa, synthetic construct
TSYAGSNSLV

SEQ ID NO: 187 - protein, 9 aa, synthetic construct
SSYAGGKWV

SEQ ID NO: 188 - protein, 11 aa, synthetic construct
AAWDDSLNGPV

SEQ ID NO: 189 - protein, 9 aa, synthetic construct
QSFDASTLV

SEQ ID NO: 190 - protein, 11 aa, synthetic construct
QSYDSDNHEVI

SEQ ID NO: 191 - protein, 11 aa, synthetic construct
QSYDSSLSVVV

SEQ ID NO: 192 - protein, 10 aa, synthetic construct
QSYDTSNRKV

SEQ ID NO: 193 - protein, 12 aa, synthetic construct
QVWDTNSDPVFV

SEQ ID NO: 194 - protein, 10 aa, synthetic construct
VLYMGSGISM

SEQ ID NO: 195 - protein, 11 aa, synthetic construct
SAWDSSLSAWV

SEQ ID NO: 196 - protein, 11 aa, synthetic construct
QQYFSSPPIFT

SEQ ID NO: 197 - protein, 9 aa, synthetic construct
QQYYSTPPT

SEQ ID NO: 198 - protein, 12 aa, synthetic construct
GVWDDSLNGHWV

SEQ ID NO: 199 - protein, 11 aa, synthetic construct
AAWDDSLKGRV

SEQ ID NO: 200 - protein, 9 aa, synthetic construct
QQYGSSRLS

SEQ ID NO: 201 - protein, 10 aa, synthetic construct
SSYAGSNNVV

SEQ ID NO: 202 - protein, 9 aa, synthetic construct
QAWDSSTAV

SEQ ID NO: 203 - protein, 11 aa, synthetic construct
SAWDSSLTAVV

SEQ ID NO: 204 - protein, 11 aa, synthetic construct
SAWDSSLSAWV

SEQ ID NO: 205 - protein, 11 aa, synthetic construct
AAWDDSLDGPV

SEQ ID NO: 206 - protein, 9 aa, synthetic construct
QQRSMWPLT

SEQ ID NO: 207 - protein, 11 aa, synthetic construct
SSWDDDLNGPV

SEQ ID NO: 208 - protein, 8 aa, synthetic construct
QSYDSSVV

SEQ ID NO: 209 - protein, 11 aa, synthetic construct
AAWDVSLNGQV

SEQ ID NO: 210 - protein, 11 aa, synthetic construct
SAWDSSLSDWV

SEQ ID NO: 211 - protein, 9 aa, synthetic construct
QQRFNWPPT

SEQ ID NO: 212 - protein, 10 aa, synthetic construct
QSADASENSV

SEQ ID NO: 213 - protein, 9 aa, synthetic construct
QSYDTSNLV

SEQ ID NO: 214 - protein, 10 aa, synthetic construct
ETWDSNTHVV

SEQ ID NO: 215 - protein, 9 aa, synthetic construct
QQVNSFPRT

SEQ ID NO: 216 - protein, 11 aa, synthetic construct
SAWDESLSSVL

SEQ ID NO: 217 - protein, 8 aa, synthetic construct
GGTFSSYA

SEQ ID NO: 218 - protein, 8 aa, synthetic construct
GVTFSSYA

SEQ ID NO: 219 - protein, 8 aa, synthetic construct
GGTFSSYA

SEQ ID NO: 220 - protein, 8 aa, synthetic construct
GGIFSSYA

SEQ ID NO: 221 - protein, 8 aa, synthetic construct
GVIFSSYA

SEQ ID NO: 222 - protein, 8 aa, synthetic construct
GGTFSSYA

SEQ ID NO: 223 - protein, 8 aa, synthetic construct
GGTFSSYA

SEQ ID NO: 224 - protein, 8 aa, synthetic construct
GGPFRSYA

SEQ ID NO: 225 - protein, 8 aa, synthetic construct
GVPFSSYA

SEQ ID NO: 226 - protein, 8 aa, synthetic construct
GVTFSSYA

SEQ ID NO: 227 - protein, 8 aa, synthetic construct
GVIFSSYA

SEQ ID NO: 228 - protein, 8 aa, synthetic construct
GVTFSSYA

SEQ ID NO: 229 - protein, 8 aa, synthetic construct
GGTFSSYA

SEQ ID NO: 230 - protein, 8 aa, synthetic construct
GGTFSSYA

SEQ ID NO: 231 - protein, 8 aa, synthetic construct
GGPFSSYA

SEQ ID NO: 232 - protein, 8 aa, synthetic construct
GGIFSSYA

SEQ ID NO: 233 - protein, 8 aa, synthetic construct
GGIFRSYA

SEQ ID NO: 234 - protein, 8 aa, synthetic construct
GGTFSSYA

SEQ ID NO: 235 - protein, 8 aa, synthetic construct
GVTFSSYA

SEQ ID NO: 236 - protein, 8 aa, synthetic construct
GGTFSSYA

SEQ ID NO: 237 - protein, 8 aa, synthetic construct
GGTFRSYA

SEQ ID NO: 238 - protein, 8 aa, synthetic construct
GGTFSSYA

SEQ ID NO: 239 - protein, 8 aa, synthetic construct
GGPFSSYA

SEQ ID NO: 240 - protein, 8 aa, synthetic construct
GVTFSSYA

SEQ ID NO: 241 - protein, 8 aa, synthetic construct
GGTFSSYA

SEQ ID NO: 242 - protein, 8 aa, synthetic construct
GVTFRSYA

SEQ ID NO: 243 - protein, 8 aa, synthetic construct
GGTFSSYA

SEQ ID NO: 244 - protein, 8 aa, synthetic construct
GVTFSSYA

SEQ ID NO: 245 - protein, 8 aa, synthetic construct
GGPFSSYA

SEQ ID NO: 246 - protein, 8 aa, synthetic construct
GGIFSSYA

SEQ ID NO: 247 - protein, 8 aa, synthetic construct
IITIFGTA

SEQ ID NO: 248 - protein, 8 aa, synthetic construct
ISPIFGTA

SEQ ID NO: 249 - protein, 8 aa, synthetic construct
ISAIFGTA

SEQ ID NO: 250 - protein, 8 aa, synthetic construct
ITPIFGTA

SEQ ID NO: 251 - protein, 8 aa, synthetic construct
ISPIFGTA

SEQ ID NO: 252 - protein, 8 aa, synthetic construct
ISPIFGTA

SEQ ID NO: 253 - protein, 8 aa, synthetic construct
IITIFGTA

SEQ ID NO: 254 - protein, 8 aa, synthetic construct
IIPIFGTA

SEQ ID NO: 255 - protein, 8 aa, synthetic construct
ISPLFGTA

SEQ ID NO: 256 - protein, 8 aa, synthetic construct
ISPMFGTA

SEQ ID NO: 257 - protein, 8 aa, synthetic construct
IIPIFGTA

SEQ ID NO: 258 - protein, 8 aa, synthetic construct
ISPVFGTA

SEQ ID NO: 259 - protein, 8 aa, synthetic construct
IVPLFGTA

SEQ ID NO: 260 - protein, 8 aa, synthetic construct
IIPIFGTA

SEQ ID NO: 261 - protein, 8 aa, synthetic construct
ISPIFGTA

SEQ ID NO: 262 - protein, 8 aa, synthetic construct
ISAIFGTA

SEQ ID NO: 263 - protein, 8 aa, synthetic construct
IIPMFGTA

SEQ ID NO: 264 - protein, 8 aa, synthetic construct
INPIFGTA

SEQ ID NO: 265 - protein, 8 aa, synthetic construct
ISPMFGTA

SEQ ID NO: 266 - protein, 8 aa, synthetic construct
ITPLFGTA

SEQ ID NO: 267 - protein, 8 aa, synthetic construct
IMPIFGTA

SEQ ID NO: 268 - protein, 8 aa, synthetic construct
ISPMFGTA

SEQ ID NO: 269 - protein, 8 aa, synthetic construct
IIPIFGTA

SEQ ID NO: 270 - protein, 8 aa, synthetic construct
ITPIFGTA

SEQ ID NO: 271 - protein, 8 aa, synthetic construct
ISPMFGTA

SEQ ID NO: 272 - protein, 8 aa, synthetic construct
ISGIFGTA

SEQ ID NO: 273 - protein, 8 aa, synthetic construct
ISPIFGTA

SEQ ID NO: 274 - protein, 8 aa, synthetic construct
ISPMFGTA

SEQ ID NO: 275 - protein, 8 aa, synthetic construct
ISPMFGTA

SEQ ID NO: 276 - protein, 8 aa, synthetic construct
ISPIFGTA

SEQ ID NO: 277 - protein, 10 aa, synthetic construct
ARGATGFYDV

SEQ ID NO: 278 - protein, 16 aa, synthetic construct
ARGREYYASNGDSFDV

SEQ ID NO: 279 - protein, 20 aa, synthetic construct
ARDLSRDSLNLPGSSPGYDL

SEQ ID NO: 280 - protein, 16 aa, synthetic construct
ARGSGYYVAASGAFDV

SEQ ID NO: 281 - protein, 16 aa, synthetic construct
ARSRGYAPGTSFHYDV

SEQ ID NO: 282 - protein, 14 aa, synthetic construct
ARDQGGTRGNYFDV

SEQ ID NO: 283 - protein, 10 aa, synthetic construct
ARGGGGRFDV

SEQ ID NO: 284 - protein, 10 aa, synthetic construct
ARGGVYSFDV

SEQ ID NO: 285 - protein, 18 aa, synthetic construct
ARGLGTYSPSLYPRGMDV

SEQ ID NO: 286 - protein, 15 aa, synthetic construct
ARGRAYLSVRGSFDV

SEQ ID NO: 287 - protein, 10 aa, synthetic construct
ARGGSGSFDV

SEQ ID NO: 288 - protein, 18 aa, synthetic construct
ARSRGYTVSSLAGRYFDQ

SEQ ID NO: 289 - protein, 10 aa, synthetic construct
ARGLGLYFDV

SEQ ID NO: 290 - protein, 15 aa, synthetic construct
ARVRGGYGPYGDFDV

SEQ ID NO: 291 - protein, 16 aa, synthetic construct
ARGRSYIVSVSPGFDV

SEQ ID NO: 292 - protein, 16 aa, synthetic construct
ARDSGIASGYTAYMDY

SEQ ID NO: 293 - protein, 10 aa, synthetic construct
ARGAGSTFDV

SEQ ID NO: 294 - protein, 14 aa, synthetic construct
ARGESAYYSRNYDV

SEQ ID NO: 295 - protein, 16 aa, synthetic construct
ARGGGYYPAGVGRYDV

SEQ ID NO: 296 - protein, 14 aa, synthetic construct
ARGPTLYSPPVFDV

SEQ ID NO: 297 - protein, 16 aa, synthetic construct
ARGAGVSAGPSWPFDV

SEQ ID NO: 298 - protein, 16 aa, synthetic construct
ARSRGYNVAASFGFDV

SEQ ID NO: 299 - protein, 14 aa, synthetic construct
ARGTDYSGYRGFDV

SEQ ID NO: 300 - protein, 9 aa, synthetic construct
ARGGGVFDV

SEQ ID NO: 301 - protein, 15 aa, synthetic construct
AREGGYSPGGVDFDY

SEQ ID NO: 302 - protein, 14 aa, synthetic construct
ARSPAYYFGPNMDV

SEQ ID NO: 303 - protein, 18 aa, synthetic construct
ARGPGYHPAGASGQFFDL

SEQ ID NO: 304 - protein, 16 aa, synthetic construct
ARGRGYAPDALTNFDV

SEQ ID NO: 305 - protein, 18 aa, synthetic construct
ARGYSYYPGGGGGRNFDY

SEQ ID NO: 306 - protein, 15 aa, synthetic construct
ARSGGYYDYGVGYDQ

SEQ ID NO: 307 - protein, 8 aa, synthetic construct
SSNIGSNT

SEQ ID NO: 308 - protein, 6 aa, synthetic construct
NIATKS

SEQ ID NO: 309 - protein, 6 aa, synthetic construct
NIATKS

SEQ ID NO: 310 - protein, 8 aa, synthetic construct
INNVGDQG

SEQ ID NO: 311 - protein, 6 aa, synthetic construct
NIGSKS

SEQ ID NO: 312 - protein, 8 aa, synthetic construct
SNNVGNQG

SEQ ID NO: 313 - protein, 8 aa, synthetic construct
TSNIGNNA

SEQ ID NO: 314 - protein, 8 aa, synthetic construct
GSNVGSNV

SEQ ID NO: 315 - protein, 8 aa, synthetic construct
SSNIGRND

SEQ ID NO: 316 - protein, 8 aa, synthetic construct
SSNIGSNT

SEQ ID NO: 317 - protein, 8 aa, synthetic construct
SSNLGSNY

SEQ ID NO: 318 - protein, 7 aa, synthetic construct
ESLCSTC

SEQ ID NO: 319 - protein, 9 aa, synthetic construct
TGAVTSGYY

SEQ ID NO: 320 - protein, 8 aa, synthetic construct
SSNIGSHS

SEQ ID NO: 321 - protein, 9 aa, synthetic construct
SSDVGGYNY

SEQ ID NO: 322 - protein, 6 aa, synthetic construct
SLRTSY

SEQ ID NO: 323 - protein, 8 aa, synthetic construct
SSNIGSNT

SEQ ID NO: 324 - protein, 8 aa, synthetic construct
SSNVGNQG

SEQ ID NO: 325 - protein, 12 aa, synthetic construct
QNVLYSSNNKNN

SEQ ID NO: 326 - protein, 9 aa, synthetic construct
SGSVSTTNY

SEQ ID NO: 327 - protein, 8 aa, synthetic construct
SNNVGKQG

SEQ ID NO: 328 - protein, 6 aa, synthetic construct
QYIDRS

SEQ ID NO: 329 - protein, 9 aa, synthetic construct
SGSVSSFNY

SEQ ID NO: 330 - protein, 8 aa, synthetic construct
SSNIGNNA

SEQ ID NO: 331 - protein, 8 aa, synthetic construct
SGSIASTY

SEQ ID NO: 332 - protein, 9 aa, synthetic construct
SSNIGAGYD

SEQ ID NO: 333 - protein, 8 aa, synthetic construct
SNNVGNQG

SEQ ID NO: 334 - protein, 12 aa, synthetic construct
RSLFDSSDNKNY

SEQ ID NO: 335 - protein, 8 aa, synthetic construct
SSNIGSNT

SEQ ID NO: 336 - protein, 8 aa, synthetic construct
RSNIGSNT

SEQ ID NO: 337-366 - skipped (30 entries)

SEQ ID NO: 367 - protein, 11 aa, synthetic construct
AAWDDSLNGPV

SEQ ID NO: 368 - protein, 12 aa, synthetic construct
AAWDDSLSGPWV

SEQ ID NO: 369 - protein, 11 aa, synthetic construct
SAWDSSLSDWV

SEQ ID NO: 370 - protein, 9 aa, synthetic construct
QQYSSSPYT

SEQ ID NO: 371 - protein, 11 aa, synthetic construct
QLWDHTNSHVV

SEQ ID NO: 372 - protein, 11 aa, synthetic construct
SAWDNTVSGWV

SEQ ID NO: 373 - protein, 11 aa, synthetic construct
EAWDDSLSGPV

SEQ ID NO: 374 - protein, 11 aa, synthetic construct
AAWDDRLNGFV

SEQ ID NO: 375 - protein, 11 aa, synthetic construct
AAWDASLMIYV

SEQ ID NO: 376 - protein, 11 aa, synthetic construct
AAWDDSLNGYV

SEQ ID NO: 377 - protein, 11 aa, synthetic construct
AAWDDSLNGVV

SEQ ID NO: 378 - protein, 9 aa, synthetic construct
QQYGSSPQT

SEQ ID NO: 379 - protein, 9 aa, synthetic construct
LLYYGGPWV

SEQ ID NO: 380 - protein, 11 aa, synthetic construct
AAWDDGLSGWV

SEQ ID NO: 381 - protein, 11 aa, synthetic construct
ASWDDSLNAYV

SEQ ID NO: 382 - protein, 11 aa, synthetic construct
NSRGSGGNPYV

SEQ ID NO: 383 - protein, 11 aa, synthetic construct
AAWDDSLNGRV

SEQ ID NO: 384 - protein, 11 aa, synthetic construct
SAWDNSLSAWV

SEQ ID NO: 385 - protein, 9 aa, synthetic construct
QQYYGKPFT

SEQ ID NO: 386 - protein, 10 aa, synthetic construct
VLYMGRGIYV

SEQ ID NO: 387 - protein, 11 aa, synthetic construct
SAWDSSLSVWV

SEQ ID NO: 388 - protein, 9 aa, synthetic construct
HQTSSLPWT

SEQ ID NO: 389 - protein, 10 aa, synthetic construct
ALYVGGGISV

SEQ ID NO: 390 - protein, 11 aa, synthetic construct
AAWDDSLSGPV

SEQ ID NO: 391 - protein, 9 aa, synthetic construct
QSFDASTLV

SEQ ID NO: 392 - protein, 11 aa, synthetic construct
QSYDSSLSVVV

SEQ ID NO: 393 - protein, 11 aa, synthetic construct
SAWDSSLSAWV

SEQ ID NO: 394 - protein, 11 aa, synthetic construct
QQYFSSPPIFT

SEQ ID NO: 395 - protein, 11 aa, synthetic construct
AAWDDSLKGRV

SEQ ID NO: 396 - protein, 8 aa, synthetic construct
QSYDSSVV

SEQ ID NO: 397 - DNA, 372 bp, synthetic construct
  source 1..372: mol_type = other DNA
caggttcaattagtgcagtctggtgctgaagtgaaaaagcccggctcaagtgttaaagtaagctgtaaggcgagcggtggcccattcagctcatacgccattagctgggtgcgacaggctcctggtcagggcctcgaatggatgggcggcattagcccaatgtttggcactgcaaattatgcccagaaatttcagggtagagtcacaattaccgcagacaagagcacctcaaccgcctacatggaactgagtagcctgcgttccgaagatacagctgtgtattactgtgcgcgcgacgacggttacgctcctagtggtggtctgcgtgagtttgacgtttggggccaggggaccttagtcactgtgtctagc

SEQ ID NO: 398 - DNA, 340 bp, synthetic construct
  source 1..340: mol_type = other DNA
gacatccagatgacccagtctccagactccctggctgtgtctctgggcgagagggccaccatcaactgcaagtccagccggagtgttttatacagctccaacaacaagaactacttagcttggtaccaacaaaaaccgggacagcctcctaagttgctcatttattgggcttctacccgggaatccggggtccctgaccgattcagtggcagcgggtctgggacagatttcactctcaccatcagcagcctgcaggctgaagatgtggcggtttattactgtcagcaatattatagtggttcctggacattcggccaagggaccaaggtggaaatcaaac

SEQ ID NO: 399 - DNA, 363 bp, synthetic construct
  source 1..363: mol_type = other DNA
caggttcaattagtgcagtctggtgctgaagtgaaaaagcccggctcaagtgttaaagtaagctgtaaggcgagcggaggcatctttagctcatacgccattagctgggtgcgacaggctcctggtcagggcctcgaatggatgggcggcattagccctatctttggcactgcaaattatgcccagaaatttcagggtagagtcacaattaccgcagataaaagcacgaataccgcctacatggaactgagtagcctgcgttccgaagatacagctgtgtattactgtgcgcgcggtcgtggtgcttacatgggtcctagtatggatgtgtggggccaggggaccttagtcactgtgtctagc

SEQ ID NO: 400 - DNA, 325 bp, synthetic construct
  source 1..325: mol_type = other DNA
cagcctgtgctgactcagccaccctcggtgtcagtggccccaggacagacggccaggattacctgtgggggaaacaacattggaagtaaaagtgtgcactggtaccagcagaagccaggccaggcccctgtgctggtcgtctatgatgatagcgaccggccctcagggatccctgagcgattctctggctccaactctgggaacacggccaccctgaccatcagcagggtcgaggccggggatgaggccgactactactgtcaggtgtgggataggagtagtgatcatgtggtgttcggcggagggaccaagctgaccgtcctag

SEQ ID NO: 401 - DNA, 363 bp, synthetic construct
  source 1..363: mol_type = other DNA
caggttcaattagtgcagtctggtgctgaagtgaaaaagcccggctcaagtgttaaagtaagctgtaaggcgagcggaggtaccttcagctcatacgccattagctgggtgcgacaggctcctggtcagggcctcgaatggatgggcggcatcagcccaatctttggcactgcaaattatgcccagaaatttcagggtagagtcacaattaccgcagataaaagcacgtcaactgtgtatatggaactgagtagcctgcgttccgaagatacagctgtgtattactgtgcgcgcggtgctcgttactacgctggtggttacttcgatgtgtggggccaggggaccttagtcactgtgtctagc

SEQ ID NO: 402 - DNA, 325 bp, synthetic construct
  source 1..325: mol_type = other DNA
gaaattgtgctgactcagtctccaggcaccctgtctttgtctccaggggaaagagccaccctctcctgcagggccagtcagactgttagcaactacttagcctggtatcagcagagacctggccaggctcccaggctcctcatctacgctgcatccacgcgggccactggtgtcccagccaggttcagtggcagcgggtctgggacagagttcactctcaccatcagcagcctgcaatctgaagattttgcaatttattactgtcaacagtatgataacttgcctccggtcactttcggccctgggaccacagtggatatcaaac

SEQ ID NO: 403 - DNA, 375 bp, synthetic construct
  source 1..375: mol_type = other DNA
caggttcaattagtgcagtctggtgctgaagtgaaaaagcccggctcaagtgttaaagtaagctgtaaggcgagcggtgttacctttagctcatacgccattagctgggtgcgacaggctcctggtcagggcctcgaatggatgggcggcatcagcccaatcttcggtactgcaaattatgcccagaaatttcagggtagagtcacaattaccgcagatcagagtaccaacactgtctacatggaactgagtagcctgcgttccgaagatacagctgtgtattactgtgcgcgcgacagtggtaattacgacggttacggtcctggtagtcgtttcgacgtgtggggccaggggaccttagtcactgtgtctagc

SEQ ID NO: 404 - DNA, 331 bp, synthetic construct
  source 1..331: mol_type = other DNA
cagcctgggctgactcagccaccctcagcgtctgggacccccgggcagagggtcaccatctcttgttctggaagcagctccaacatcggaagtaatactgtaaactggtaccagcagctcccaggaacggcccccaaactcctcatctatagtaataatcagcggccctcaggggtccctgaccgattctctggctccaagtctggcacctcagcctccctggccatcagtgggctccagtctgaggatgaggctgattatttctgttcagcttgggatgacagcctgggtggcgaggtcttcggaactgggaccaaggtcaacgtcctag

SEQ ID NO: 405 - DNA, 363 bp, synthetic construct
  source 1..363: mol_type = other DNA
caggttcaattagtgcagtctggtgctgaagtgaaaaagcccggctcaagtgttaaagtaagctgtaaggcgagcggagtgacctttagttcttacgccattagctgggtgcgacaggctcctggtcagggcctcgaatggatgggcggcattatgcctatgttcggcactgcaaattatgcccagaaatttcagggtagagtcacaattaccgcagataagagtacgagcactgcctatatggaactgagtagcctgcgttccgaagatacagctgtgtattactgtgcgcgcgagcgtggtagttggagtttcggttactttgatgtgtggggccaggggaccttagtcactgtgtctagc

SEQ ID NO: 406 - DNA, 325 bp, synthetic construct
  source 1..325: mol_type = other DNA
ctgcctgtgctgactcagccaccctcgatgtcagcggccccaggacagacggccaggattacctgtgggggagaccacattggaagtaaaagtgtgcactggtaccagcggaagccgggccaggcccctgtgctggtcatctattctgacaccgaccggccctcagggatccctgagcggttctctggctccaactctgggaacacggccaccctgaccatcagcagggtcgaagccggggatgaggccgactatttctgtcaggtgtgggatagtagtaatgatcatccggtgttcggcggaggcaccaagctgaccgtcctag

SEQ ID NO: 407 - DNA, 363 bp, synthetic construct
  source 1..363: mol_type = other DNA
caggttcaattagtgcagtctggtgctgaagtgaaaaagcccggctcaagtgttaaagtaagctgtaaggcgagcggagtgacctttagctcttacgccattagctgggtgcgacaggctcctggtcagggcctcgaatggatgggcggcatcagccctctgtttggcactgcaaattatgcccagaaatttcagggtagagtcacaattaccgcagacaaaagtacgagcaccgtgtatatggaactgagtagcctgcgttccgaagatacagctgtgtattactgtgcgcgcagtcgtacatacgctgacggtcgtacattcgacgtgtggggccaggggaccttagtcactgtgtctagc

SEQ ID NO: 408 - DNA, 331 bp, synthetic construct
  source 1..331: mol_type = other DNA
cagtctgtgctgactcagccaccctccgcgtccgggtctcctggacagtcggtcaccatctcctgcactggaaccagtagtgacgttggtggttataaccatgtctcctggtaccaacagcacccaggcaaagcccccaaagtcctgatttatgacgtcagtaagcggccctcaggggtcccagatcgcttctctggctccaagtctggcaacacggcctccctgaccgtctctgggctccaggctgaggatgaggctgattattactgcacctcatatgcaggcagcaacagtttggtcttcggaactgggaccgaggtcaccgtcctag

SEQ ID NO: 409 - DNA, 372 bp, synthetic construct
  source 1..372: mol_type = other DNA
caggttcaattagtgcagtctggtgctgaagtgaaaaagcccggctcaagtgttaaagtaagctgtaaggcgagcggtggcactttcagttcatacgccattagctgggtgcgacaggctcctggtcagggcctcgaatggatgggcggcatcagcccaatctttggtactgcaaattatgcccagaaatttcagggtagagtcacaattaccgcagacaagagcacgagcactgcctacatggaactgagtagcctgcgttccgaagatacagctgtgtattactgtgcgcgcgagctgggttacctggctggtagtcctagtcctggtttcgattactggggccaggggaccttagtcactgtgtctagc

SEQ ID NO: 410 - DNA, 328 bp, synthetic construct
  source 1..328: mol_type = other DNA
cagtctgtgctgactcagccaccctccgcgtccgggtctcctggacagtcagtcaccatctcctgcactggaaccagcagtgacgttggtggttataactatgtctcctggtaccaacagcacccaggcaaagcccccaaactcatcatttatgaggtcactaagcggccctcaggggtccctgatcgcttctctggctccaagtctggcaacacggcctccctgaccgtcgctgggctccaggctgaggatgaggctgattattactgcagctcgtatgcaggcggcaagtgggtcttcggaactgggaccaaggtcaccgtcctag

SEQ ID NO: 411 - DNA, 363 bp, synthetic construct
  source 1..363: mol_type = other DNA
caggttcaattagtgcagtctggtgctgaagtgaaaaagcccggctcaagtgttaaagtaagctgtaaggcgagcggaggcacttttagctcttacgccattagctgggtgcgacaggctcctggtcagggcctcgaatggatgggcggcattagcccaatcttcggcactgcaaattatgcccagaaatttcagggtagagtcacaattaccgcagacaccagcacctcaaccgcctacatggaactgagtagcctgcgttccgaagatacagctgtgtattactgtgcgcgcagtcgtcgttactgggctgacggtggtttcgattattggggccaggggaccttagtcactgtgtctagc

SEQ ID NO: 412 - DNA, 331 bp, synthetic construct
  source 1..331: mol_type = other DNA
ctgcctgtgctgactcagccaccctcagcgtctgggacccccgggcagagggtcaccatctcttgttctggaagcagctccaacatgggaagaaataccgtcaactggtaccggcacctcccagggacggcccccgaactcctcatctatgataatgatgagcgtccctcaggggtccctgaccgattctctggctccaagtctggcacctcagcctccctggccatcagtgggctccagtctgaagatgagggtcattattactgtgctgcgtgggatgacagcctgaatggtccggtgttcggcggagggaccaagctgaccgtcctgg

SEQ ID NO: 413 - DNA, 366 bp, synthetic construct
  source 1..366: mol_type = other DNA
caggttcaattagtgcagtctggtgctgaagtgaaaaagcccggctcaagtgttaaagtaagctgtaaggcgagcggaggtacttttagttcttacgccattagctgggtgcgacaggctcctggtcagggcctcgaatggatgggcggcattagccctatgttcggtactgcaaattatgcccagaaatttcagggtagagtcacaattaccgcagacaaaagtaccagcactgcctacatggaactgagtagcctgcgttccgaagatacagctgtgtattactgtgcgcgcgagggtggttacagtcctggtggtgttgacttcgactactggggccaggggaccttagtcactgtgtctagc

SEQ ID NO: 414 - DNA, 331 bp, synthetic construct
  source 1..331: mol_type = other DNA
aattttatgctgactcagccccactctgtgtcggagtctccggggaagacggtaaccatctcctgcacccgcagcagtggcagcattgccagcacctatgtgcagtggtaccggcagcgcccgggcagtgcccccaccactgtgatctatgaggatcatcagagaccctctggggtccctgatcggttctccggctccctcgacagctcctccaactctgcctccctcaccatctctggactgaggactgaggacgcggcaacctactactgtcagtcttttgatgccagcactctggtgttcggcggcgggaccaagctgaccgtcctcg

SEQ ID NO: 415 - DNA, 363 bp, synthetic construct
  source 1..363: mol_type = other DNA
caggttcaattagtgcagtctggtgctgaagtgaaaaagcccggctcaagtgttaaagtaagctgtaaggcgagcggtgttacttttagttcttacgccattagctgggtgcgacaggctcctggtcagggcctcgaatggatgggcggcatcagcccaatctttggtactgcaaattatgcccagaaatttcagggtagagtcacaattaccgcagacgaaagtacgaatactgtgtatatggaactgagtagcctgcgttccgaagatacagctgtgtattactgtgcgcgcggtacaacatacagtacagctcgttacttcgacgtttggggccaggggaccttagtcactgtgtctagc

SEQ ID NO: 416 - DNA, 337 bp, synthetic construct
  source 1..337: mol_type = other DNA
aattttatgctgactcagccccactctgtgtcggagtctccggggaagacggtaaccatctcctgcacccgcagaagtggcagcattgccagcaactatgtgcagtggtaccagcagcgcccgggcagtgcccccaccactgtgatctatgaggataaccaaagaccctctggggtccctgatcgcttctctggctccatcgacaggtcctccaactctgcctccctcaccatctctggactgaagactgaggacgaggctgactactactgtcagtcttatgacagcgacaatcatgaagtgatattcggcggagggaccaagctgaccgtcctag

SEQ ID NO: 417 - DNA, 363 bp, synthetic construct
  source 1..363: mol_type = other DNA
caggttcaattagtgcagtctggtgctgaagtgaaaaagcccggctcaagtgttaaagtaagctgtaaggcgagcggagtgacttttcgttcatacgccattagctgggtgcgacaggctcctggtcagggcctcgaatggatgggcggcatcagcggtatctttggtactgcaaattatgcccagaaatttcagggtagagtcacaattaccgcagatgagagcacgtcaaccgcatatatggaactgagtagcctgcgttccgaagatacagctgtgtattactgtgcgcgcagtcctgcttactacttcggtcctaatatggacgtgtggggccaggggaccttagtcactgtgtctagc

SEQ ID NO: 418 - DNA, 334 bp, synthetic construct
  source 1..334: mol_type = other DNA
cagtctgtgctgactcagccaccctcagtgtctggggccccagggcagagggtcaccatctcctgcactgggagcagctccaacatcggggcaggttatgatgtacactggtaccagcaacttccaggaacagtccccaaactcatcatctatgataatagcaatcggccctcaggggtccctgcccgattctctggctccaagtctggcacctcagcctccctggccatcagtgggctccagtctgaggatgaggccgcatattattgccagtcgtatgacagcagcctgagtgttgtggtattcggcggtgggaccaagctgtccgtcctag

SEQ ID NO: 419 - DNA, 369 bp, synthetic construct
  source 1..369: mol_type = other DNA
caggttcaattagtgcagtctggtgctgaagtgaaaaagcccggctcaagtgttaaagtaagctgtaaggcgagcggaggcacttttagttcttacgccattagctgggtgcgacaggctcctggtcagggcctcgaatggatgggcggcatcagccctatgtttggtactgcaaattatgcccagaaatttcagggtagagtcacaattaccgcagacaaaagtacgagcactgcctacatggaactgagtagcctgcgttccgaagatacagctgtgtattactgtgcgcgcagtagtcgttacgctcctagtgacagtacaaattttgatcaatggggccaggggaccttagtcactgtgtctagc

SEQ ID NO: 420 - DNA, 334 bp, synthetic construct
  source 1..334: mol_type = other DNA
aattttatgctgactcagccccactctgtgtcggagtctccggggaagacggtaaccatctcctgcaccggcagcagtggcagcattgccagcaactatgtgcagtggtaccagcagcgcccgggcagtgcccccaccactgtgatctatgaggataaccaaagaccctctggggtccctgatcggttctctggctccatcgacagctcctccaactctgcctccctcaccatctctggactgaagactgaggacgaggctgactactactgtcagtcttatgataccagcaatcggaaggttttcggcggagggaccaagctgaccgtcctag

SEQ ID NO: 421 - DNA, 363 bp, synthetic construct
  source 1..363: mol_type = other DNA
caggttcaattagtgcagtctggtgctgaagtgaaaaagcccggctcaagtgttaaagtaagctgtaaggcgagcggtggcccatttagttcatacgccattagctgggtgcgacaggctcctggtcagggcctcgaatggatgggcggcattagcggtatctttggcactgcaaattatgcccagaaatttcagggtagagtcacaattaccgcagatgagagcacgtcaaccgcatatatggaactgagtagcctgcgttccgaagatacagctgtgtattactgtgcgcgcggtgaccgtttctacgttggtgagcgtttcgatgtgtggggccaggggaccttagtcactgtgtctagc

SEQ ID NO: 422 - DNA, 328 bp, synthetic construct
  source 1..328: mol_type = other DNA
cagtctgtgctgactcagccaccctcggtgtcagtggccccaggacagacggccagaattacctgtgggggaaatgacattggaagtaaaagtgtccactggtaccagcagaagccaggccaggcccctgtgctggtcgtctatgatgatatcgaccggccctcagggatccctgagcgattctctggctccaactatggggacacggccaccctgaccatcagctgggtcgaggccggggatgaggccgactattactgtcaggtgtgggatactaatagtgatcccgtctttgtcttcggaagtgggaccaaggtcaccgtccttg

SEQ ID NO: 423 - DNA, 375 bp, synthetic construct
  source 1..375: mol_type = other DNA
caggttcaattagtgcagtctggtgctgaagtgaaaaagcccggctcaagtgttaaagtaagctgtaaggcgagcggtggcaccttcagctcttacgccattagctgggtgcgacaggctcctggtcagggcctcgaatggatgggcggcattagcccaatcttcggtactgcaaattatgcccagaaatttcagggtagagtcacaattaccgcagaccagagcacgagcactgcctacatggaactgagtagcctgcgttccgaagatacagctgtgtattactgtgcgcgcggtggtggtgttggtcgtatctggatcgctggttacggtttcgatcagtggggccaggggaccttagtcactgtgtctagc

SEQ ID NO: 424 - DNA, 331 bp, synthetic construct
  source 1..331: mol_type = other DNA
cagactgtggtgactcaggagccatcgttctcagtgtcccctggagggacagttaccctcacttgtggcttgagctctggctcagtctccactagtaactaccccagctggtaccagcagaccccaggccagcctccacgcacgctcatctacagcacaaacactcgctcttctggggtccctgatcgcttctctggctccatccttgggaacaaagctgccctcaccatcacgggggcccaggcagatgatgaatctgattattactgtgtcctatatatgggtagtggcatttcgatgttcggcggagggaccaagttgaccgtcctag

SEQ ID NO: 425 - DNA, 375 bp, synthetic construct
  source 1..375: mol_type = other DNA
caggttcaattagtgcagtctggtgctgaagtgaaaaagcccggctcaagtgttaaagtaagctgtaaggcgagcggtggtacttttagttcatacgccattagctgggtgcgacaggctcctggtcagggcctcgaatggatgggcggcattagcccaatctttggtactgcaaattatgcccagaaatttcagggtagagtcacaattaccgcagacgaaagcaccagcactgtgtacatggaactgagtagcctgcgttccgaagatacagctgtgtattactgtgcgcgcggtcctggttaccaccctgctggtgctagtggtcaattctttgatctttggggccaggggaccttagtcactgtgtctagc

SEQ ID NO: 426 - DNA, 331 bp, synthetic construct
  source 1..331: mol_type = other DNA
tcctatgagctgactcagccaccctcggtgtccaaggacttgagacagaccgccacactcacctgcactgggaacagcaacaatgttggcaaccaaggagcagcttggctgcagcagcaccagggccaccctcccaaactcctatcctacaggaataaccaccggccctcagggatctcagacagatcatctgcatccaggtcaggagacacagcctccctgaccattactggactccagcctgaggacgaggctgactattactgctcagcatgggacagcagcctcagtgcttgggtgttcggcggagggaccaagctgaccgtcctag

SEQ ID NO: 427 - DNA, 369 bp, synthetic construct
  source 1..369: mol_type = other DNA
caggttcaattagtgcagtctggtgctgaagtgaaaaagcccggctcaagtgttaaagtaagctgtaaggcgagcggtgtgaccttcagctcatacgccattagctgggtgcgacaggctcctggtcagggcctcgaatggatgggcggcattagccctatgtttggtactgcaaattatgcccagaaatttcagggtagagtcacaattaccgcagatgaaagcaccaacaccgcctatatggaactgagtagcctgcgttccgaagatacagctgtgtattactgtgcgcgcggtcgtggttacgctcctgacgctctgacaaattttgacgtttggggccaggggaccttagtcactgtgtctagc

SEQ ID NO: 428 - DNA, 346 bp, synthetic construct
  source 1..346: mol_type = other DNA
gaaattgtgctgactcagtctccagactccctggctatgtctctgggcgagagggccaccgtcaactgcaagtccagccggagtcttttcgacagctccgacaataagaactacttagcttggtaccagaagaaaccaggacagcctcctcaattgctcatttactgggcatctacccgacaatccggggtccctgaccgattcagtggcagcgggtctgggacagatttcactctcaccatcagcagcctgcaggctgaagatgtggcagtttattactgtcagcaatattttagtagtcctcccatattcaccttcggccctgggaccaaagtggagatcaaac

SEQ ID NO: 429 - DNA, 366 bp, synthetic construct
  source 1..366: mol_type = other DNA
caggttcaattagtgcagtctggtgctgaagtgaaaaagcccggctcaagtgttaaagtaagctgtaaggcgagcggagtgacttttagctcatacgccattagctgggtgcgacaggctcctggtcagggcctcgaatggatgggcggcattacccctatgtttggtactgcaaattatgcccagaaatttcagggtagagtcacaattaccgcagataaaagtacgagcaccgtctatatggaactgagtagcctgcgttccgaagatacagctgtgtattactgtgcgcgcggtcgtggttacatcgctgttgctggtgacatggacgtgtggggccaggggaccttagtcactgtgtctagc

SEQ ID NO: 430 - DNA, 340 bp, synthetic construct
  source 1..340: mol_type = other DNA
gacatccagatgacccagtctccagactccctggctgtgtctctgggcgagagggccaccatcaactgcaagtccagtcggagtgttttatacagctccaacaataagaactacttagcttggtaccagcagaaagcaggacagcctcctaagctgctcatttactgggcatctacccgggaatccggggtccctgaccgattcagtggcagcgggtctgggacagatttcactctcaccatcagcagcctgcaggctgaagatgtggcagtttattactgtcagcaatattatagtactcctccgacgttcggccaagggaccaaggtggaaatcaaac

SEQ ID NO: 431 - DNA, 372 bp, synthetic construct
  source 1..372: mol_type = other DNA
caggttcaattagtgcagtctggtgctgaagtgaaaaagcccggctcaagtgttaaagtaagctgtaaggcgagcggtgttaccttcagttcatacgccattagctgggtgcgacaggctcctggtcagggcctcgaatggatgggcggcattagcccactgttcggtactgcaaattatgcccagaaatttcagggtagagtcacaattaccgcagataagagcacgagcactgcctacatggaactgagtagcctgcgttccgaagatacagctgtgtattactgtgcgcgcggtgacgcttactacgttggtggtggtgctcgtccttttgacctctggggccaggggaccttagtcactgtgtctagc

SEQ ID NO: 432 - DNA, 334 bp, synthetic construct
  source 1..334: mol_type = other DNA
tcctatgagctgactcagccaccctcagtgtctgagacccccgggcagaacgtcattatctcttgttctggaggcagctccaacatcggagttaattatgtatactggtatcaggtggtcccaggagcggcccccaaactcctcatctataggaataatcagcggccctcaggggtccctgaccgattctctggctccaagtctggcacctcagcctccctggccatcagtggactccagtctgaggatgaggctgactattactgtggagtatgggatgacagcctgaatggtcattgggtgttcggcggagggaccgacctgaccgtcctgg

SEQ ID NO: 433 - DNA, 375 bp, synthetic construct
  source 1..375: mol_type = other DNA
caggttcaattagtgcagtctggtgctgaagtgaaaaagcccggctcaagtgttaaagtaagctgtaaggcgagcggtggtccatttagctcatacgccattagctgggtgcgacaggctcctggtcagggcctcgaatggatgggcggcattagccctatgtttggtactgcaaattatgcccagaaatttcagggtagagtcacaattaccgcagatgaaagcacgtcaaccgtgtacatggaactgagtagcctgcgttccgaagatacagctgtgtattactgtgcgcgcggttacagttactaccctggtggtggtggtggtcgtaatttcgactactggggccaggggaccttagtcactgtgtctagc

SEQ ID NO: 434 - DNA, 331 bp, synthetic construct
  source 1..331: mol_type = other DNA
ctgcctgtgctgactcagccaccctcagcgtctgggacccccgggcagagggtcaccatctcttgttctggaagcagctccaacatcggaagtaatactgtaaactggtaccagcagctcccaggaacggcccccaaactcctcatctatagtaataatcagcggccctcaggggtccctgaccgattctctggctccaagtctggcacctcagcctccctggccatcagtgggctccagtctgagggtgaggctgattattactgtgcagcatgggatgacagcctgaaaggtcgggtgttcggcggagggaccaaggtgaccgtcctag

SEQ ID NO: 435 - DNA, 372 bp, synthetic construct
  source 1..372: mol_type = other DNA
caggttcaattagtgcagtctggtgctgaagtgaaaaagcccggctcaagtgttaaagtaagctgtaaggcgagcggaggtccattcagttcttacgccattagctgggtgcgacaggctcctggtcagggcctcgaatggatgggcggcatcagccctctgtttggtactgcaaattatgcccagaaatttcagggtagagtcacaattaccgcagatgaaagcacgtcaaccgcctacatggaactgagtagcctgcgttccgaagatacagctgtgtattactgtgcgcgcgctcctacatactacgctagtcgtgacagttacaatttcgattattggggccaggggaccttagtcactgtgtctagc

SEQ ID NO: 436 - DNA, 325 bp, synthetic construct
  source 1..325: mol_type = other DNA
gaaacgacactcacgcagtctccagccaccctgtctgtgtctccaggggaaagagccaccctctcctgcagggccagtcagagtgttgacagaggctacttagcctggtatcagcagaagcctggccaggctcccaggctcctcatctatggtgcatcccacagggccgctggcatcccagacaggttcagtggcagtgggtctgggacagacttcactctcaccatcagcagactggagcctgaggattttgcagtatatttctgtcagcagtatggtagttcacgcctctctttcggcggagggaccaaggtggagatccaac

SEQ ID NO: 437 - DNA, 363 bp, synthetic construct
  source 1..363: mol_type = other DNA
caggttcaattagtgcagtctggtgctgaagtgaaaaagcccggctcaagtgttaaagtaagctgtaaggcgagcggtgtgactttcagttcttacgccattagctgggtgcgacaggctcctggtcagggcctcgaatggatgggcggcattagccctatgttcggtactgcaaattatgcccagaaatttcagggtagagtcacaattaccgcagacaagagcacgaatactgcatatatggaactgagtagcctgcgttccgaagatacagctgtgtattactgtgcgcgcgacacaacatacatcgctggtggtcacttcgacgtttggggccaggggaccttagtcactgtgtctagc

SEQ ID NO: 438 - DNA, 331 bp, synthetic construct
  source 1..331: mol_type = other DNA
cagtctgtgctgactcagccaccctccgcgtccgggtctcctggacagtcagtcaccatctcctgcactggaaccagcagtgacattggtgcttataactatgtctcctggtaccaacaacacccagacaaagcccccaagctcatcatttatgaggtcagtaagcggccctcaggggtccctgatcgcttctctggctccaagtctggcaacacggcctccctgaccgtctctgggctccaggctgaggatgaggctgattattactgcagctcctatgcaggcagcaacaatgtggtattcggcggagggaccaagctgaccgtcctag

SEQ ID NO: 439 - DNA, 366 bp, synthetic construct
  source 1..366: mol_type = other DNA
caggttcaattagtgcagtctggtgctgaagtgaaaaagcccggctcaagtgttaaagtaagctgtaaggcgagcggtggtaccttcagctcatacgccattagctgggtgcgacaggctcctggtcagggcctcgaatggatgggcggcatcagccctctgtttggcactgcaaattatgcccagaaatttcagggtagagtcacaattaccgcagatgagagtaccaatactgcctatatggaactgagtagcctgcgttccgaagatacagctgtgtattactgtgcgcgcgctagtggttacttcacaggttggggtacattcgactactggggccaggggaccttagtcactgtgtctagc

SEQ ID NO: 440 - DNA, 319 bp, synthetic construct
  source 1..319: mol_type = other DNA
tcctatgagctgactcagccaccctcggtgtcagtgtccccaggacagacggccaggatcacctgctctggagatgcattgccaaagcaatatgcttattggtaccagcagaagccaggccaggcccctgtgctggtgatatataaagacagtgagaggccctcagggatccctgagcgattctctggctccaactctgggaacacagccactctgaccatcagcgggacccaggctttggatgaggctgactattactgtcaggcgtgggacagcagcactgctgtcttcggaactgggaccaaggtcaccgtcctag

SEQ ID NO: 441 - DNA, 363 bp, synthetic construct
  source 1..363: mol_type = other DNA
caggttcaattagtgcagtctggtgctgaagtgaaaaagcccggctcaagtgttaaagtaagctgtaaggcgagcggaggtacttttagttcttacgccattagctgggtgcgacaggctcctggtcagggcctcgaatggatgggcggcatcagccctatctttggtactgcaaattatgcccagaaatttcagggtagagtcacaattaccgcagacaagagcacgagcaccgcctacatggaactgagtagcctgcgttccgaagatacagctgtgtattactgtgcgcgcggtcgttactactacacagttggtgtttatgacgtttggggccaggggaccttagtcactgtgtctagc

SEQ ID NO: 442 - DNA, 331 bp, synthetic construct
  source 1..331: mol_type = other DNA
tcctatgagctgactcagccaccctcggtgtccaagggcttgagacagaccgccaccctcacctgcattggggacagcgacaatgttggcaaccaaggagtaggttggctgcagcagcaccagggccaccctcccaaactcctgtcctacagggataacacccggccctcaggcatctcagagagattctctgcatccaggtcaggaaacacagcctccctgaccattactggactccagcctgaggacgaggctgactattactgctcagcatgggacagcagcctcactgccgtggtgttcggcggagggaccaagctggccgtcctag

SEQ ID NO: 443 - DNA, 381 bp, synthetic construct
  source 1..381: mol_type = other DNA
caggttcaattagtgcagtctggtgctgaagtgaaaaagcccggctcaagtgttaaagtaagctgtaaggcgagcggtgttaccttcagttcttacgccattagctgggtgcgacaggctcctggtcagggcctcgaatggatgggcggcattagccctatctttggcactgcaaattatgcccagaaatttcagggtagagtcacaattaccgcagataaaagtacctcaaccgtctacatggaactgagtagcctgcgttccgaagatacagctgtgtattactgtgcgcgcggtggtggttacagtgctgacggtggtgctggtaataatacaatcttcgacgtttggggccaggggaccttagtcactgtgtctagc

SEQ ID NO: 444 - DNA, 331 bp, synthetic construct
  source 1..331: mol_type = other DNA
cagcctgtgctgactcagccaccctcggtgtccaagggcttgagacagaccgccacactcacctgtactgggaacaacaacaatgttggcaaccaaggagcagcctggctgcagcagcaccagggccaccctcccaaactcctatccgacaggaataacaaccggccctcagggatctcagagagattatctgcatccaggtcaggaaatacagcctccctgaccattactggactccaggctgaggacgaggctgactattactgctcagcatgggacagcagcctcagtgcttgggtgttcggcggagggaccaagctgaccgtcctaa

SEQ ID NO: 445 - DNA, 366 bp, synthetic construct
  source 1..366: mol_type = other DNA
caggttcaattagtgcagtctggtgctgaagtgaaaaagcccggctcaagtgttaaagtaagctgtaaggcgagcggagttacttttagctcttacgccattagctgggtgcgacaggctcctggtcagggcctcgaatggatgggcggcattagccctctgtttggtactgcaaattatgcccagaaatttcagggtagagtcacaattaccgcagatgagagtacctcaactgcatatatggaactgagtagcctgcgttccgaagatacagctgtgtattactgtgcgcgcgagcgtggttacacagttggtggtggtggtatggacgtgtggggccaggggaccttagtcactgtgtctagc

SEQ ID NO: 446 - DNA, 334 bp, synthetic construct
  source 1..334: mol_type = other DNA
cagtctgccctgactcagcctccctccgcgtccgggtctcctggacagtcagtcaccatctcctgcactggaaccagcagtgacgttggtgctcacaactttgtctcctggtaccaacaacacccagacaaagcccccaaactcatcatttatgaggtcaataggcggccctcaggggtccctgatcgcttctctggctccaagtctggcacctcagcctccctggccatcagtggtctccagtctgacgatgaggctgactattactgtgcagcatgggacgacagtctcgatggtccggtgttcggcggagggaccaagctgaccgtcctag

SEQ ID NO: 447 - DNA, 372 bp, synthetic construct
  source 1..372: mol_type = other DNA
caggttcaattagtgcagtctggtgctgaagtgaaaaagcccggctcaagtgttaaagtaagctgtaaggcgagcggagttacttttagctcatacgccattagctgggtgcgacaggctcctggtcagggcctcgaatggatgggcggcatcagcccaatctttggtactgcaaattatgcccagaaatttcagggtagagtcacaattaccgcagacaagagcacgaacactgtgtacatggaactgagtagcctgcgttccgaagatacagctgtgtattactgtgcgcgcgagtacctgggtgacgactacagtagtggtagttacttcgatgtgtggggccaggggaccttagtcactgtgtctagc

SEQ ID NO: 448 - DNA, 322 bp, synthetic construct
  source 1..322: mol_type = other DNA
gaaacgacactcacgcagtctccaggcacactgtctttgtctccaggggaaacagccatcctctcctgtagggccagtcagagtgttgatagtcacttagcctggtaccaacaaaaaggtggccaggctcccaggctcctcatctatggtgcatccaccagggccactggtatcccagccaggttcagtggcagtgggtctgggacagacttcactctcaccatcaatggcctagagcctgaggattttgcaatttatttctgtcagcagcgcagcatgtggcccctcactttcggcggagggaccaaggtggagatcaaac

SEQ ID NO: 449 - DNA, 363 bp, synthetic construct
  source 1..363: mol_type = other DNA
caggttcaattagtgcagtctggtgctgaagtgaaaaagcccggctcaagtgttaaagtaagctgtaaggcgagcggaggtactttcagttcatacgccattagctgggtgcgacaggctcctggtcagggcctcgaatggatgggcggcattagccctatgtttggtactgcaaattatgcccagaaatttcagggtagagtcacaattaccgcagacaaaagtacctcaactgcatatatggaactgagtagcctgcgttccgaagatacagctgtgtattactgtgcgcgcgagagtggttacagtggtacaggtcaatttgacgtgtggggccaggggaccttagtcactgtgtctagc

SEQ ID NO: 450 - DNA, 331 bp, synthetic construct
  source 1..331: mol_type = other DNA
cagtctgtgctgactcagccaccctcagcgtctgggaccgccgggcagagggtcacaatctcctgttttgggagaacctccaacgtcggacgaaacactgttaactggtaccaacaattgcccggagcggcccccaagatcctcatttttaacgataatcaacggccctcgggggtccctgaccgcttctctggctccaagtctggcaccgccgcctccctgaccataagtaggctccagtccgcggatgaggctgattactattgttcatcatgggatgacgacctgaacggtccggtcttcggcggagggaccaagctgagcgtcgtag

SEQ ID NO: 451 - DNA, 366 bp, synthetic construct
  source 1..366: mol_type = other DNA
caggttcaattagtgcagtctggtgctgaagtgaaaaagcccggctcaagtgttaaagtaagctgtaaggcgagcggaggtatctttagttcttacgccattagctgggtgcgacaggctcctggtcagggcctcgaatggatgggcggcattagcccaatcttcggtactgcaaattatgcccagaaatttcagggtagagtcacaattaccgcagatgagagcacgaacaccgcctatatggaactgagtagcctgcgttccgaagatacagctgtgtattactgtgcgcgcagtggtggttactacgactacggtgttggttacgaccaatggggccaggggaccttagtcactgtgtctagc

SEQ ID NO: 452 - DNA, 322 bp, synthetic construct
  source 1..322: mol_type = other DNA
cagcctgtgctgactcagccaccctcagcgtctgggacccccgggcagagggtcaccatctcttgttctggaggcaggtccaacatcggaagtaatactgttaactggtaccagcagctcccaggaacggcccccaaactcctcatctatagtaataatcaccggccctcaggggtccctgatcgcttctctggctccaagtctggcaacacggcctccctgaccatctctgggctccaggcggaggatgaggctgattattactgccagtcctatgacagcagcgttgtattcggcggagggaccaagctgaccgtcctag

SEQ ID NO: 453 - DNA, 366 bp, synthetic construct
  source 1..366: mol_type = other DNA
caggttcaattagtgcagtctggtgctgaagtgaaaaagcccggctcaagtgttaaagtaagctgtaaggcgagcggtggtaccttcagctcttacgccattagctgggtgcgacaggctcctggtcagggcctcgaatggatgggcggcattacccctatctttggcactgcaaattatgcccagaaatttcagggtagagtcacaattaccgcagacgagagtaccagcactgcctacatggaactgagtagcctgcgttccgaagatacagctgtgtattactgtgcgcgcagtggtggttacagtcctagtatcggtggtttcgacgtttggggccaggggaccttagtcactgtgtctagc

SEQ ID NO: 454 - DNA, 331 bp, synthetic construct
  source 1..331: mol_type = other DNA
cagcctgggctgactcagccaccctcagcgtctgggacccccgggcagagggtcaccatctcttgttctggaagcaggtccaatatcggaagaaatactgtaaactggtaccagcaactcccaggaacggcccccaaactcctcatctatagtaacaatcagcggccctcaggggtccctgaccgagtctctggctccaagtctggcacctcagcctccctggccatcagtgggctccagtctgaggatgaggctgattattactgtgcagcatgggatgtgagcctgaatggtcaggtcttcggaactgggaccaaggtcaccgtcctag

SEQ ID NO: 455 - DNA, 369 bp, synthetic construct
  source 1..369: mol_type = other DNA
caggttcaattagtgcagtctggtgctgaagtgaaaaagcccggctcaagtgttaaagtaagctgtaaggcgagcggaggtacctttagttcatacgccattagctgggtgcgacaggctcctggtcagggcctcgaatggatgggcggcatcagcccaatctttggtactgcaaattatgcccagaaatttcagggtagagtcacaattaccgcagatcgcagtacgagcaccgcctacatggaactgagtagcctgcgttccgaagatacagctgtgtattactgtgcgcgcggtcctggttacgaccctagtagtctgcgtggttttgacgtttggggccaggggaccttagtcactgtgtctagc

SEQ ID NO: 456 - DNA, 330 bp, synthetic construct
  source 1..330: mol_type = other DNA
tcctatgagctgactcagccaccctcggtgtccaaggacttgagacagaccgccacactcacctgcactgggaacagcaacaatgttggcaaccaaggagcagcttggctgcagcagcaccagggccaccctcccaaactcctattctacaagaataacaaccggccctcagggatttcagagagattatctgcatccaggtcaggaaacacagcctccctgaccattactggactccagcctgaggacgaggctgactattactgctcagcatgggacagcagcctcagtgattgggtgttcggcggagggaccaagctgaccgtccta

SEQ ID NO: 457 - DNA, 351 bp, synthetic construct
  source 1..351: mol_type = other DNA
caggttcaattagtgcagtctggtgctgaagtgaaaaagcccggctcaagtgttaaagtaagctgtaaggcgagcggtggcacttttagctcttacgccattagctgggtgcgacaggctcctggtcagggcctcgaatggatgggcggcatcattccaatctttggtactgcaaattatgcccagaaatttcagggtagagtcacaattaccgcagatgagagcacgaatactgcctacatggaactgagtagcctgcgttccgaagatacagctgtgtattactgtgcgcgcggtgaggaggcttactacgacctttggggccaggggaccttagtcactgtgtctagc

SEQ ID NO: 458 - DNA, 322 bp, synthetic construct
  source 1..322: mol_type = other DNA
gaaattgtgttgacgcagtctccaggcaccctgtctttgtctccaggggaaagagccaccctctcctgctgggccagtcagagtgttagcagcttcttagcctggtaccaacacaaacctggccaggttcccaggctcctcatctatgatgcatccaatagggccactggcatcccagccaggttctctggcagtgggtctgggacacacttcactctcactatcagcagcctagagcctgaagattttgcagtttattactgtcagcagcgtttcaattggcctccgacgttcggccaagggaccaaggtggaaagcaaac

SEQ ID NO: 459 - DNA, 366 bp, synthetic construct
  source 1..366: mol_type = other DNA
caggttcaattagtgcagtctggtgctgaagtgaaaaagcccggctcaagtgttaaagtaagctgtaaggcgagcggaggtacttttagttcatacgccattagctgggtgcgacaggctcctggtcagggcctcgaatggatgggcggcatcacccctatgttcggcactgcaaattatgcccagaaatttcagggtagagtcacaattaccgcagacaaaagtacgagcaccgcctatatggaactgagtagcctgcgttccgaagatacagctgtgtattactgtgcgcgcggtacaagttacctgcctggtcgtagtggttttgatgtttggggccaggggaccttagtcactgtgtctagc

SEQ ID NO: 460 - DNA, 322 bp, synthetic construct
  source 1..322: mol_type = other DNA
cagcctgggctgactcagccaccctcggtgtcagtgtccccaggacagacggccaggatcacctgctctgcagatgcattgccaaagcaatatgcttattggtaccagcagaggccaggccaggcccctgtgttgctgatatataaagacactgagaggcccccagggatccctgagcgattctctggctccagctcagggacaacagtcacgttgaccatcagtggagtccaggcagaagacgaggctgactactattgtcaatcagcagacgctagtgaaaattctgtcttcggaggtgggaccaaggtcaccgtcctag

SEQ ID NO: 461 - DNA, 366 bp, synthetic construct
  source 1..366: mol_type = other DNA
caggttcaattagtgcagtctggtgctgaagtgaaaaagcccggctcaagtgttaaagtaagctgtaaggcgagcggtgttacttttcgttcatacgccattagctgggtgcgacaggctcctggtcagggcctcgaatggatgggcggcatcagcgcaatgtttggtactgcaaattatgcccagaaatttcagggtagagtcacaattaccgcagacaagagtacgaacaccgcatatatggaactgagtagcctgcgttccgaagatacagctgtgtattactgtgcgcgcggtcgtggttacgaccctagtgttggtggttttgatgtgtggggccaggggaccttagtcactgtgtctagc

SEQ ID NO: 462 - DNA, 331 bp, synthetic construct
  source 1..331: mol_type = other DNA
aattttatgctgactcagccccactctgtgtcggagtctccggggaagacggtcagcatctcctgcaccggcagcagtggcagcattgccagcaactatgtgcagtggtaccagcagcgcccgggcagtgcccccgccactgtgatctatgaggataaccaaagaccctctggggtccctgatcggttctctggctccatcgacagctcctccaactctgcctccctcaccatctctggactgaagactgaggacgaggctgactactactgtcagtcttatgataccagcaatctggtattcggcgtagggaccaagctgaccgtcctag

SEQ ID NO: 463 - DNA, 381 bp, synthetic construct
  source 1..381: mol_type = other DNA
caggttcaattagtgcagtctggtgctgaagtgaaaaagcccggctcaagtgttaaagtaagctgtaaggcgagcggtggtacctttagttcatacgccattagctgggtgcgacaggctcctggtcagggcctcgaatggatgggcggcattattcctatcttcggtactgcaaattatgcccagaaatttcagggtagagtcacaattaccgcagacgatagcacgtcaaccgcatacatggaactgagtagcctgcgttccgaagatacagctgtgtattactgtgcgcgcgacagtacacctagtgttacaagtagtctgtaccgtatccctgcttttgatgtgtggggccaggggaccttagtcactgtgtctagc

SEQ ID NO: 464 - DNA, 337 bp, synthetic construct
  source 1..337: mol_type = other DNA
ctgcctgtgctgactcaatcatcctctgcctctgcttccctgggatcctcggtcaagctcacctgcagtctgaccaatgggcccagtaactacatcatcgcatggcatcagcagcagccagagaagggccctcggtacttgatgaagcttaacagtgatggcagccacagcaagggggacgggatccctgatcgcttctcaggctccagctctggggctgagcgctacctcaccatctccaaccttaagtctgaggatgaggctgattattactgtgagacctgggacagtaacactcatgtggtattcggcggagggaccaagctgaccgtcctag

SEQ ID NO: 465 - DNA, 366 bp, synthetic construct
  source 1..366: mol_type = other DNA
caggttcaattagtgcagtctggtgctgaagtgaaaaagcccggctcaagtgttaaagtaagctgtaaggcgagcggaggtacctttagttcatacgccattagctgggtgcgacaggctcctggtcagggcctcgaatggatgggcggcattaccccaatgtttggtactgcaaattatgcccagaaatttcagggtagagtcacaattaccgcagacaagagcacgtcaactacatacatggaactgagtagcctgcgttccgaagatacagctgtgtattactgtgcgcgcggtcctggttactaccctgacagtaataattatgatctctggggccaggggaccttagtcactgtgtctagc

SEQ ID NO: 466 - DNA, 325 bp, synthetic construct
  source 1..325: mol_type = other DNA
gaaacgacactcacgcagtctccaggcaccctgtctttgtctccaggggaaagagccaccctctcctgcagggccagtcagagtgttagtagcagctacttagcctggtaccagcagaaacctggccaggctcccaggctcctcatctatggtgcatcaagtagggccactggcatcccagacaggttcagtggcagtgggtctgggacagacttcactctcaccatcagcagactggagcctgaagattttgcaacctactattgtcaacaggttaacagcttccctcgaacttttggccaggggaccaagctggagatgaaac

SEQ ID NO: 467 - DNA, 366 bp, synthetic construct
  source 1..366: mol_type = other DNA
caggttcaattagtgcagtctggtgctgaagtgaaaaagcccggctcaagtgttaaagtaagctgtaaggcgagcggtgtgacctttagctcatacgccattagctgggtgcgacaggctcctggtcagggcctcgaatggatgggcggcattagcccaatgtttggcactgcaaattatgcccagaaatttcagggtagagtcacaattaccgcagaccagagcacgaacaccgcctatatggaactgagtagcctgcgttccgaagatacagctgtgtattactgtgcgcgcggtggtacatacagtcctggtggtacatactttgatgtttggggccaggggaccttagtcactgtgtctagc

SEQ ID NO: 468 - DNA, 331 bp, synthetic construct
  source 1..331: mol_type = other DNA
cagcctgtgctgactcagccaccctcagcgtctgcgacccccggacagacggtgaccatctcttgttctggcagcagttccaacatcggcgtgagctttgtctactggtatcaacaatttccaggaacggcccccaagctcctcatttacagggatgatatgaggcagtcaggggtccctgaccgattttctggcttcaagtctggctcctcagcctccctgaccatctctgggctccagtccgaagatgaggccacttattattgttccgcgtgggatgagagcctgagtagtgtgttgttcggcggagggaccaaggtcaccgtcctag

SEQ ID NO: 469 - protein, 124 aa, synthetic construct
QVQLVQSGAEVKKPGSSVKVSCKASGGPFSSYAISWVRQAPGQGLEWMGGISPMFGTANYAQKFQGRVTITADKSTSTAYMELSSLRSEDTAVYYCARDDGYAPSGGLREFDVWGQGTLVTVSS

SEQ ID NO: 470 - protein, 113 aa, synthetic construct
DIQMTQSPDSLAVSLGERATINCKSSRSVLYSSNNKNYLAWYQQKPGQPPKLLIYWASTRESGVPDRFSGSGSGTDFTLTISSLQAEDVAVYYCQQYYSGSWTFGQGTKVEIK

SEQ ID NO: 471 - protein, 121 aa, synthetic construct
QVQLVQSGAEVKKPGSSVKVSCKASGGIFSSYAISWVRQAPGQGLEWMGGISPIFGTANYAQKFQGRVTITADKSTNTAYMELSSLRSEDTAVYYCARGRGAYMGPSMDVWGQGTLVTVSS

SEQ ID NO: 472 - protein, 108 aa, synthetic construct
QPVLTQPPSVSVAPGQTARITCGGNNIGSKSVHWYQQKPGQAPVLVVYDDSDRPSGIPERFSGSNSGNTATLTISRVEAGDEADYYCQVWDRSSDHVVFGGGTKLTVL

SEQ ID NO: 473 - protein, 121 aa, synthetic construct
QVQLVQSGAEVKKPGSSVKVSCKASGGTFSSYAISWVRQAPGQGLEWMGGISPIFGTANYAQKFQGRVTITADKSTSTVYMELSSLRSEDTAVYYCARGARYYAGGYFDVWGQGTLVTVSS

SEQ ID NO: 474 - protein, 108 aa, synthetic construct
EIVLTQSPGTLSLSPGERATLSCRASQTVSNYLAWYQQRPGQAPRLLIYAASTRATGVPARFSGSGSGTEFTLTISSLQSEDFAIYYCQQYDNLPPVTFGPGTTVDIK

SEQ ID NO: 475 - protein, 125 aa, synthetic construct
QVQLVQSGAEVKKPGSSVKVSCKASGVTFSSYAISWVRQAPGQGLEWMGGISPIFGTANYAQKFQGRVTITADQSTNTVYMELSSLRSEDTAVYYCARDSGNYDGYGPGSRFDVWGQGTLVTVSS

SEQ ID NO: 476 - protein, 110 aa, synthetic construct
QPGLTQPPSASGTPGQRVTISCSGSSSNIGSNTVNWYQQLPGTAPKLLIYSNNQRPSGVPDRFSGSKSGTSASLAISGLQSEDEADYFCSAWDDSLGGEVFGTGTKVNVL

SEQ ID NO: 477 - protein, 121 aa, synthetic construct
QVQLVQSGAEVKKPGSSVKVSCKASGVTFSSYAISWVRQAPGQGLEWMGGIMPMFGTANYAQKFQGRVTITADKSTSTAYMELSSLRSEDTAVYYCARERGSWSFGYFDVWGQGTLVTVSS

SEQ ID NO: 478 - protein, 108 aa, synthetic construct
LPVLTQPPSMSAAPGQTARITCGGDHIGSKSVHWYQRKPGQAPVLVIYSDTDRPSGIPERFSGSNSGNTATLTISRVEAGDEADYFCQVWDSSNDHPVFGGGTKLTVL

SEQ ID NO: 479 - protein, 121 aa, synthetic construct
QVQLVQSGAEVKKPGSSVKVSCKASGVTFSSYAISWVRQAPGQGLEWMGGISPLFGTANYAQKFQGRVTITADKSTSTVYMELSSLRSEDTAVYYCARSRTYADGRTFDVWGQGTLVTVSS

SEQ ID NO: 480 - protein, 121 aa, synthetic construct; identical to SEQ ID NO: 479

SEQ ID NO: 481 - protein, 124 aa, synthetic construct
QVQLVQSGAEVKKPGSSVKVSCKASGGTFSSYAISWVRQAPGQGLEWMGGISPIFGTANYAQKFQGRVTITADKSTSTAYMELSSLRSEDTAVYYCARELGYLAGSPSPGFDYWGQGTLVTVSS

SEQ ID NO: 482 - protein, 109 aa, synthetic construct
QSVLTQPPSASGSPGQSVTISCTGTSSDVGGYNYVSWYQQHPGKAPKLIIYEVTKRPSGVPDRFSGSKSGNTASLTVAGLQAEDEADYYCSSYAGGKWVFGTGTKVTVL

SEQ ID NO: 483 - protein, 121 aa, synthetic construct
QVQLVQSGAEVKKPGSSVKVSCKASGGTFSSYAISWVRQAPGQGLEWMGGISPIFGTANYAQKFQGRVTITADTSTSTAYMELSSLRSEDTAVYYCARSRRYWADGGFDYWGQGTLVTVSS

SEQ ID NO: 484 - protein, 110 aa, synthetic construct
LPVLTQPPSASGTPGQRVTISCSGSSSNMGRNTVNWYRHLPGTAPELLIYDNDERPSGVPDRFSGSKSGTSASLAISGLQSEDEGHYYCAAWDDSLNGPVFGGGTKLTVL

SEQ ID NO: 485 - protein, 122 aa, synthetic construct
QVQLVQSGAEVKKPGSSVKVSCKASGGTFSSYAISWVRQAPGQGLEWMGGISPMFGTANYAQKFQGRVTITADKSTSTAYMELSSLRSEDTAVYYCAREGGYSPGGVDFDYWGQGTLVTVSS

SEQ ID NO: 486 - protein, 110 aa, synthetic construct
NFMLTQPHSVSESPGKTVTISCTRSSGSIASTYVQWYRQRPGSAPTTVIYEDHQRPSGVPDRFSGSLDSSSNSASLTISGLRTEDAATYYCQSFDASTLVFGGGTKLTVL

SEQ ID NO: 487 - protein, 121 aa, synthetic construct
QVQLVQSGAEVKKPGSSVKVSCKASGVTFSSYAISWVRQAPGQGLEWMGGISPIFGTANYAQKFQGRVTITADESTNTVYMELSSLRSEDTAVYYCARGTTYSTARYFDVWGQGTLVTVSS

SEQ ID NO: 488 - protein, 112 aa, synthetic construct
NFMLTQPHSVSESPGKTVTISCTRRSGSIASNYVQWYQQRPGSAPTTVIYEDNQRPSGVPDRFSGSIDRSSNSASLTISGLKTEDEADYYCQSYDSDNHEVIFGGGTKLTVL

SEQ ID NO: 489 - protein, 121 aa, synthetic construct
QVQLVQSGAEVKKPGSSVKVSCKASGVTFRSYAISWVRQAPGQGLEWMGGISGIFGTANYAQKFQGRVTITADESTSTAYMELSSLRSEDTAVYYCARSPAYYFGPNMDVWGQGTLVTVSS

SEQ ID NO: 490 - protein, 111 aa, synthetic construct
QSVLTQPPSVSGAPGQRVTISCTGSSSNIGAGYDVHWYQQLPGTVPKLIIYDNSNRPSGVPARFSGSKSGTSASLAISGLQSEDEAAYYCQSYDSSLSVVVFGGGTKLSVL

SEQ ID NO: 491 - protein, 123 aa, synthetic construct
QVQLVQSGAEVKKPGSSVKVSCKASGGTFSSYAISWVRQAPGQGLEWMGGISPMFGTANYAQKFQGRVTITADKSTSTAYMELSSLRSEDTAVYYCARSSRYAPSDSTNFDQWGQGTLVTVSS

SEQ ID NO: 492 - protein, 111 aa, synthetic construct
NFMLTQPHSVSESPGKTVTISCTGSSGSIASNYVQWYQQRPGSAPTTVIYEDNQRPSGVPDRFSGSIDSSSNSASLTISGLKTEDEADYYCQSYDTSNRKVFGGGTKLTVL

SEQ ID NO: 493 - protein, 121 aa, synthetic construct
QVQLVQSGAEVKKPGSSVKVSCKASGGPFSSYAISWVRQAPGQGLEWMGGISGIFGTANYAQKFQGRVTITADESTSTAYMELSSLRSEDTAVYYCARGDRFYVGERFDVWGQGTLVTVSS

SEQ ID NO: 494 - protein, 109 aa, synthetic construct
QSVLTQPPSVSVAPGQTARITCGGNDIGSKSVHWYQQKPGQAPVLVVYDDIDRPSGIPERFSGSNYGDTATLTISWVEAGDEADYYCQVWDTNSDPVFVFGSGTKVTVL

SEQ ID NO: 495 - protein, 125 aa, synthetic construct
QVQLVQSGAEVKKPGSSVKVSCKASGGTFSSYAISWVRQAPGQGLEWMGGISPIFGTANYAQKFQGRVTITADQSTSTAYMELSSLRSEDTAVYYCARGGGVGRIWIAGYGFDQWGQGTLVTVSS

SEQ ID NO: 496 - protein, 110 aa, synthetic construct
QTVVTQEPSFSVSPGGTVTLTCGLSSGSVSTSNYPSWYQQTPGQPPRTLIYSTNTRSSGVPDRFSGSILGNKAALTITGAQADDESDYYCVLYMGSGISMFGGGTKLTVL

SEQ ID NO: 497 - protein, 125 aa, synthetic construct
QVQLVQSGAEVKKPGSSVKVSCKASGGTFSSYAISWVRQAPGQGLEWMGGISPIFGTANYAQKFQGRVTITADESTSTVYMELSSLRSEDTAVYYCARGPGYHPAGASGQFFDLWGQGTLVTVSS

SEQ ID NO: 498 - protein, 110 aa, synthetic construct
SYELTQPPSVSKDLRQTATLTCTGNSNNVGNQGAAWLQQHQGHPPKLLSYRNNHRPSGISDRSSASRSGDTASLTITGLQPEDEADYYCSAWDSSLSAWVFGGGTKLTVL

SEQ ID NO: 499 - protein, 123 aa, synthetic construct
QVQLVQSGAEVKKPGSSVKVSCKASGVTFSSYAISWVRQAPGQGLEWMGGISPMFGTANYAQKFQGRVTITADESTNTAYMELSSLRSEDTAVYYCARGRGYAPDALTNFDVWGQGTLVTVSS

SEQ ID NO: 500 - protein, 115 aa, synthetic construct
EIVLTQSPDSLAMSLGERATVNCKSSRSLFDSSDNKNYLAWYQKKPGQPPQLLIYWASTRQSGVPDRFSGSGSGTDFTLTISSLQAEDVAVYYCQQYFSSPPIFTFGPGTKVEIK

SEQ ID NO: 501 - protein, 122 aa, synthetic construct
QVQLVQSGAEVKKPGSSVKVSCKASGVTFSSYAISWVRQAPGQGLEWMGGITPMFGTANYAQKFQGRVTITADKSTSTVYMELSSLRSEDTAVYYCARGRGYIAVAGDMDVWGQGTLVTVSS

SEQ ID NO: 502 - protein, 113 aa, synthetic construct
DIQMTQSPDSLAVSLGERATINCKSSRSVLYSSNNKNYLAWYQQKAGQPPKLLIYWASTRESGVPDRFSGSGSGTDFTLTISSLQAEDVAVYYCQQYYSTPPTFGQGTKVEIK

SEQ ID NO: 503 - protein, 124 aa, synthetic construct
QVQLVQSGAEVKKPGSSVKVSCKASGVTFSSYAISWVRQAPGQGLEWMGGISPLFGTANYAQKFQGRVTITADKSTSTAYMELSSLRSEDTAVYYCARGDAYYVGGGARPFDLWGQGTLVTVSS

SEQ ID NO: 504 - protein, 111 aa, synthetic construct
SYELTQPPSVSETPGQNVIISCSGGSSNIGVNYVYWYQVVPGAAPKLLIYRNNQRPSGVPDRFSGSKSGTSASLAISGLQSEDEADYYCGVWDDSLNGHWVFGGGTDLTVL

SEQ ID NO: 505 - protein, 125 aa, synthetic construct
QVQLVQSGAEVKKPGSSVKVSCKASGGPFSSYAISWVRQAPGQGLEWMGGISPMFGTANYAQKFQGRVTITADESTSTVYMELSSLRSEDTAVYYCARGYSYYPGGGGGRNFDYWGQGTLVTVSS

SEQ ID NO: 506 - protein, 110 aa, synthetic construct
LPVLTQPPSASGTPGQRVTISCSGSSSNIGSNTVNWYQQLPGTAPKLLIYSNNQRPSGVPDRFSGSKSGTSASLAISGLQSEGEADYYCAAWDDSLKGRVFGGGTKVTVL

SEQ ID NO: 507 - protein, 124 aa, synthetic construct
QVQLVQSGAEVKKPGSSVKVSCKASGGPFSSYAISWVRQAPGQGLEWMGGISPLFGTANYAQKFQGRVTITADESTSTAYMELSSLRSEDTAVYYCARAPTYYASRDSYNFDYWGQGTLVTVSS

SEQ ID NO: 508 - protein, 108 aa, synthetic construct
ETTLTQSPATLSVSPGERATLSCRASQSVDRGYLAWYQQKPGQAPRLLIYGASHRAAGIPDRFSGSGSGTDFTLTISRLEPEDFAVYFCQQYGSSRLSFGGGTKVEIQ

SEQ ID NO: 509 - protein, 121 aa, synthetic construct
QVQLVQSGAEVKKPGSSVKVSCKASGVTFSSYAISWVRQAPGQGLEWMGGISPMFGTANYAQKFQGRVTITADKSTNTAYMELSSLRSEDTAVYYCARDTTYIAGGHFDVWGQGTLVTVSS

SEQ ID NO: 510 - protein, 110 aa, synthetic construct
QSVLTQPPSASGSPGQSVTISCTGTSSDIGAYNYVSWYQQHPDKAPKLIIYEVSKRPSGVPDRFSGSKSGNTASLTVSGLQAEDEADYYCSSYAGSNNVVFGGGTKLTVL

SEQ ID NO: 511 - protein, 122 aa, synthetic construct
QVQLVQSGAEVKKPGSSVKVSCKASGGTFSSYAISWVRQAPGQGLEWMGGISPLFGTANYAQKFQGRVTITADESTNTAYMELSSLRSEDTAVYYCARASGYFTGWGTFDYWGQGTLVTVSS

SEQ ID NO: 512 - protein, 106 aa, synthetic construct
SYELTQPPSVSVSPGQTARITCSGDALPKQYAYWYQQKPGQAPVLVIYKDSERPSGIPERFSGSNSGNTATLTISGTQALDEADYYCQAWDSSTAVFGTGTKVTVL

SEQ ID NO: 513 - protein, 121 aa, synthetic construct
QVQLVQSGAEVKKPGSSVKVSCKASGGTFSSYAISWVRQAPGQGLEWMGGISPIFGTANYAQKFQGRVTITADKSTSTAYMELSSLRSEDTAVYYCARGRYYYTVGVYDVWGQGTLVTVSS

SEQ ID NO: 514 - protein, 110 aa, synthetic construct
SYELTQPPSVSKGLRQTATLTCIGDSDNVGNQGVGWLQQHQGHPPKLLSYRDNTRPSGISERFSASRSGNTASLTITGLQPEDEADYYCSAWDSSLTAVVFGGGTKLAVL

SEQ ID NO: 515 - protein, 127 aa, synthetic construct
QVQLVQSGAEVKKPGSSVKVSCKASGVTFSSYAISWVRQAPGQGLEWMGGISPIFGTANYAQKFQGRVTITADKSTSTVYMELSSLRSEDTAVYYCARGGGYSADGGAGNNTIFDVWGQGTLVTVSS

SEQ ID NO: 516 - protein, 110 aa, synthetic construct
QPVLTQPPSVSKGLRQTATLTCTGNNNNVGNQGAAWLQQHQGHPPKLLSDRNNNRPSGISERLSASRSGNTASLTITGLQAEDEADYYCSAWDSSLSAWVFGGGTKLTVL

SEQ ID NO: 517 - protein, 122 aa, synthetic construct
QVQLVQSGAEVKKPGSSVKVSCKASGVTFSSYAISWVRQAPGQGLEWMGGISPLFGTANYAQKFQGRVTITADESTSTAYMELSSLRSEDTAVYYCARERGYTVGGGGMDVWGQGTLVTVSS

SEQ ID NO: 518 - protein, 111 aa, synthetic construct
QSALTQPPSASGSPGQSVTISCTGTSSDVGAHNFVSWYQQHPDKAPKLIIYEVNRRPSGVPDRFSGSKSGTSASLAISGLQSDDEADYYCAAWDDSLDGPVFGGGTKLTVL

SEQ ID NO: 519 - protein, 124 aa, synthetic construct
QVQLVQSGAEVKKPGSSVKVSCKASGVTFSSYAISWVRQAPGQGLEWMGGISPIFGTANYAQKFQGRVTITADKSTNTVYMELSSLRSEDTAVYYCAREYLGDDYSSGSYFDVWGQGTLVTVSS

SEQ ID NO: 520 - protein, 107 aa, synthetic construct
ETTLTQSPGTLSLSPGETAILSCRASQSVDSHLAWYQQKGGQAPRLLIYGASTRATGIPARFSGSGSGTDFTLTINGLEPEDFAIYFCQQRSMWPLTFGGGTKVEIK

SEQ ID NO: 521 - protein, 121 aa, synthetic construct
QVQLVQSGAEVKKPGSSVKVSCKASGGTFSSYAISWVRQAPGQGLEWMGGISPMFGTANYAQKFQGRVTITADKSTSTAYMELSSLRSEDTAVYYCARESGYSGTGQFDVWGQGTLVTVSS

SEQ ID NO: 522 - protein, 110 aa, synthetic construct
QSVLTQPPSASGTAGQRVTISCFGRTSNVGRNTVNWYQQLPGAAPKILIFNDNQRPSGVPDRFSGSKSGTAASLTISRLQSADEADYYCSSWDDDLNGPVFGGGTKLSVV

SEQ ID NO: 523 - protein, 122 aa, synthetic construct
QVQLVQSGAEVKKPGSSVKVSCKASGGIFSSYAISWVRQAPGQGLEWMGGISPIFGTANYAQKFQGRVTITADESTNTAYMELSSLRSEDTAVYYCARSGGYYDYGVGYDQWGQGTLVTVSS

SEQ ID NO: 524 - protein, 107 aa, synthetic construct
QPVLTQPPSASGTPGQRVTISCSGGRSNIGSNTVNWYQQLPGTAPKLLIYSNNHRPSGVPDRFSGSKSGNTASLTISGLQAEDEADYYCQSYDSSVVFGGGTKLTVL

SEQ ID NO: 525 - protein, 122 aa, synthetic construct
QVQLVQSGAEVKKPGSSVKVSCKASGGTFSSYAISWVRQAPGQGLEWMGGITPIFGTANYAQKFQGRVTITADESTSTAYMELSSLRSEDTAVYYCARSGGYSPSIGGFDVWGQGTLVTVSS

SEQ ID NO: 526 - protein, 110 aa, synthetic construct
QPGLTQPPSASGTPGQRVTISCSGSRSNIGRNTVNWYQQLPGTAPKLLIYSNNQRPSGVPDRVSGSKSGTSASLAISGLQSEDEADYYCAAWDVSLNGQVFGTGTKVTVL

SEQ ID NO: 527 - protein, 123 aa, synthetic construct
QVQLVQSGAEVKKPGSSVKVSCKASGGTFSSYAISWVRQAPGQGLEWMGGISPIFGTANYAQKFQGRVTITADRSTSTAYMELSSLRSEDTAVYYCARGPGYDPSSLRGFDVWGQGTLVTVSS

SEQ ID NO: 528 - protein, 110 aa, synthetic construct
SYELTQPPSVSKDLRQTATLTCTGNSNNVGNQGAAWLQQHQGHPPKLLFYKNNNRPSGISERLSASRSGNTASLTITGLQPEDEADYYCSAWDSSLSDWVFGGGTKLTVL

SEQ ID NO: 529 - protein, 117 aa, synthetic construct
QVQLVQSGAEVKKPGSSVKVSCKASGGTFSSYAISWVRQAPGQGLEWMGGIIPIFGTANYAQKFQGRVTITADESTNTAYMELSSLRSEDTAVYYCARGEEAYYDLWGQGTLVTVSS

SEQ ID NO: 530 - protein, 107 aa, synthetic construct
EIVLTQSPGTLSLSPGERATLSCWASQSVSSFLAWYQHKPGQVPRLLIYDASNRATGIPARFSGSGSGTHFTLTISSLEPEDFAVYYCQQRFNWPPTFGQGTKVESK

SEQ ID NO: 531 - protein, 122 aa, synthetic construct
QVQLVQSGAEVKKPGSSVKVSCKASGGTFSSYAISWVRQAPGQGLEWMGGITPMFGTANYAQKFQGRVTITADKSTSTAYMELSSLRSEDTAVYYCARGTSYLPGRSGFDVWGQGTLVTVSS

SEQ ID NO: 532 - protein, 107 aa, synthetic construct
QPGLTQPPSVSVSPGQTARITCSADALPKQYAYWYQQRPGQAPVLLIYKDTERPPGIPERFSGSSSGTTVTLTISGVQAEDEADYYCQSADASENSVFGGGTKVTVL

SEQ ID NO: 533 - protein, 122 aa, synthetic construct
QVQLVQSGAEVKKPGSSVKVSCKASGVTFRSYAISWVRQAPGQGLEWMGGISAMFGTANYAQKFQGRVTITADKSTNTAYMELSSLRSEDTAVYYCARGRGYDPSVGGFDVWGQGTLVTVSS

SEQ ID NO: 534 - protein, 110 aa, synthetic construct
NFMLTQPHSVSESPGKTVSISCTGSSGSIASNYVQWYQQRPGSAPATVIYEDNQRPSGVPDRFSGSIDSSSNSASLTISGLKTEDEADYYCQSYDTSNLVFGVGTKLTVL

SEQ ID NO: 535 - protein, 127 aa, synthetic construct
QVQLVQSGAEVKKPGSSVKVSCKASGGTFSSYAISWVRQAPGQGLEWMGGIIPIFGTANYAQKFQGRVTITADDSTSTAYMELSSLRSEDTAVYYCARDSTPSVTSSLYRIPAFDVWGQGTLVTVSS

SEQ ID NO: 536 - protein, 112 aa, synthetic construct
LPVLTQSSSASASLGSSVKLTCSLTNGPSNYIIAWHQQQPEKGPRYLMKLNSDGSHSKGDGIPDRFSGSSSGAERYLTISNLKSEDEADYYCETWDSNTHVVFGGGTKLTVL

SEQ ID NO: 537 - protein, 122 aa, synthetic construct
QVQLVQSGAEVKKPGSSVKVSCKASGGTFSSYAISWVRQAPGQGLEWMGGITPMFGTANYAQKFQGRVTITADKSTSTTYMELSSLRSEDTAVYYCARGPGYYPDSNNYDLWGQGTLVTVSS

SEQ ID NO: 538 - protein, 108 aa, synthetic construct
ETTLTQSPGTLSLSPGERATLSCRASQSVSSSYLAWYQQKPGQAPRLLIYGASSRATGIPDRFSGSGSGTDFTLTISRLEPEDFATYYCQQVNSFPRTFGQGTKLEMK

SEQ ID NO: 539 - protein, 122 aa, synthetic construct
QVQLVQSGAEVKKPGSSVKVSCKASGVTFSSYAISWVRQAPGQGLEWMGGISPMFGTANYAQKFQGRVTITADQSTNTAYMELSSLRSEDTAVYYCARGGTYSPGGTYFDVWGQGTLVTVSS

SEQ ID NO: 540 - protein, 110 aa, synthetic construct
QPVLTQPPSASATPGQTVTISCSGSSSNIGVSFVYWYQQFPGTAPKLLIYRDDMRQSGVPDRFSGFKSGSSASLTISGLQSEDEATYYCSAWDESLSSVLFGGGTKVTVL

SEQ ID NO: 541 - DNA, 351 bp, synthetic construct
  source 1..351: mol_type = other DNA
caggttcaattagtgcagtctggtgctgaagtgaaaaagcccggctcaagtgttaaagtaagctgtaaggcgagcggaggtacttttagctcatacgccattagctgggtgcgacaggctcctggtcagggcctcgaatggatgggcggcattatcacaatctttggtactgcaaattatgcccagaaatttcagggtagagtcacaattaccgcagacaaaagtacctcaaccgcatacatggaactgagtagcctgcgttccgaagatacagctgtgtattactgtgcgcgcggtgctacaggtttctacgacgtttggggccaggggaccttagtcactgtgtctagc

SEQ ID NO: 542 - DNA, 331 bp, synthetic construct
  source 1..331: mol_type = other DNA
ctgcctgtgctgactcagccaccctcagcgtctgggacccccgggcagagggtcaccatctcttgttctggaagcagctccaacatcggaagtaatactgtaaactggtaccagcagctcccaggaacggcccccaaactcctcatctatagtaataatcagcggccctcaggggtccctgaccgattctctggctccaagtctggcacctcagcctccctggccatcagtgggctccagtctgaggatgaggctgattattactgtgcagcatgggatgacagcctgaatggtccggtattcggcggagggaccaagctgaccgtcctag

SEQ ID NO: 543 - DNA, 369 bp, synthetic construct
  source 1..369: mol_type = other DNA
caggttcaattagtgcagtctggtgctgaagtgaaaaagcccggctcaagtgttaaagtaagctgtaaggcgagcggagttactttcagctcatacgccattagctgggtgcgacaggctcctggtcagggcctcgaatggatgggcggcattagccctatcttcggcactgcaaattatgcccagaaatttcagggtagagtcacaattaccgcagatgaaagcacgtcaactgcatacatggaactgagtagcctgcgttccgaagatacagctgtgtattactgtgcgcgcggtcgtgagtactacgctagtaatggtgacagtttcgatgtttggggccaggggaccttagtcactgtgtctagc

SEQ ID NO: 544 - DNA, 328 bp, synthetic construct
  source 1..328: mol_type = other DNA
cagcctgtgctgactcagccaccctcggtgtcagtggccccaggaaagacggccagcatttcctgtgagggaaacaacattgcgactaaaagtgtgcactggtaccagcagaagtcaggccacgcccctgtggtggtcgtctatcatgatagcgaccggccctcaggggtccctgaccgattctctggctccaagtctggcacctcagcctccctggccatcagtgggctccggtccgaggatgaggctgattattactgtgcagcatgggatgacagcctgagtggtccttgggtgttcggcggagggaccaagctgaccgtcctag

SEQ ID NO: 545 - DNA, 369 bp, synthetic construct
  source 1..369: mol_type = other DNA
caggttcaattagtgcagtctggtgctgaagtgaaaaagcccggctcaagtgttaaagtaagctgtaaggcgagcggaggtacctttagttcatacgccattagctgggtgcgacaggctcctggtcagggcctcgaatggatgggcggcattagcgcaatcttcggcactgcaaattatgcccagaaatttcagggtagagtcacaattaccgcagatgagagcacgcgcaccgcatacatggaactgagtagcctgcgttccgaagatacagctgtgtattactgtgcgcgcggtagtggttactacgttgctgctagtggtgctttcgacgtgtggggccaggggaccttagtcactgtgtctagc

SEQ ID NO: 546 - DNA, 331 bp, synthetic construct
  source 1..331: mol_type = other DNA
cagcctgggctgactcagccaccctcggtgtcaaagggcttgagacagaccgccacactcacctgcactgggaacatcaacaatgttggcgaccaaggagcaggttggctgcagcagcaccagggccgccctcccaaactcctgtcgtacaggaatagcaaccggccctcaggtgtctcagagagattctctgcatccaggtcaggaaatacagcctccctgaccattactggactccagcctgaggacgaggctgactattactgctcagcatgggacagcagcctcagtgattgggtgttcggcggagggaccaagctgaccgtcctag

SEQ ID NO: 547 - DNA, 381 bp, synthetic construct
  source 1..381: mol_type = other DNA
caggttcaattagtgcagtctggtgctgaagtgaaaaagcccggctcaagtgttaaagtaagctgtaaggcgagcggtggcatcttcagctcatacgccattagctgggtgcgacaggctcctggtcagggcctcgaatggatgggcggcatcaccccaatcttcggcactgcaaattatgcccagaaatttcagggtagagtcacaattaccgcagacgaaagcacgcgtaccgcatatatggaactgagtagcctgcgttccgaagatacagctgtgtattactgtgcgcgcgacctgagtcgtgacagtctgaatctgcctggtagtagtcctggttacgatctctggggccaggggaccttagtcactgtgtctagc

SEQ ID NO: 548 - DNA, 322 bp, synthetic construct
  source 1..322: mol_type = other DNA
gaaacgacactcacgcagtctccaggcaccctgtctttgtctccaggagaaagagccaccctctcctgcagggccagtcagagtgttagcagcaacttagcctggtaccagcagaaacctggccaggctcccaggctcctcatctatggtgcatccaccagggccactggtatcccagccaggttcagtggcagtgggtctgggacagagttcactctcaccatcagcagcctgcagtctgaagattttgcagtgtattactgtcagcagtatagtagttctccctacacttttggccaggggaccaaactggagatcaaac

SEQ ID NO: 549 - DNA, 369 bp, synthetic construct
  source 1..369: mol_type = other DNA
caggttcaattagtgcagtctggtgctgaagtgaaaaagcccggctcaagtgttaaagtaagctgtaaggcgagcggagtgattttcagctcatacgccattagctgggtgcgacaggctcctggtcagggcctcgaatggatgggcggcattagccctatcttcggcactgcaaattatgcccagaaatttcagggtagagtcacaattaccgcagatgagagcacgtcaaccgcatatatggaactgagtagcctgcgttccgaagatacagctgtgtattactgtgcgcgcagtcgtggttacgctcctggtacaagtttccactacgatgtgtggggccaggggaccttagtcactgtgtctagc

SEQ ID NO: 550 - DNA, 325 bp, synthetic construct
  source 1..325: mol_type = other DNA
ctgcctgtgctgactcaggcaccctcaatgtcagtggccccaggaaagacggccagtattacctgtgggggagacaacattggaagtaaaagtgtgcactggtaccagcagaagccaggccaggcccctgtgctggtcatgtattatgatagcgaccggccctcagggatccctgagcgattctctggctccaactctgggaacacggccaccctgaccatcagcagggtcgaggccggggatgaggccgactatttctgccagctgtgggatcatactaattctcatgtggtcttcggcggaaggaccaaactgaccgtcctag

SEQ ID NO: 551 - DNA, 363 bp, synthetic construct
  source 1..363: mol_type = other DNA
caggttcaattagtgcagtctggtgctgaagtgaaaaagcccggctcaagtgttaaagtaagctgtaaggcgagcggtggcacctttagttcttacgccattagctgggtgcgacaggctcctggtcagggcctcgaatggatgggcggcattagcccaatctttggcactgcaaattatgcccagaaatttcagggtagagtcacaattacctcagatgagagtaccagcactgcatacatggaactgagtagcctgcgttccgaagatacagctgtgtattactgtgcgcgcgaccaaggtggtacacgtggtaattacttcgacgtttggggccaggggaccttagtcactgtgtctagc

SEQ ID NO: 552 - DNA, 331 bp, synthetic construct
  source 1..331: mol_type = other DNA
cagcctgtgctgactcagccaccctcggtgtccaagggcttgagacagaccgccacagtcacctgcactgggaacagcaacaatgttggcaaccaaggagcagcttggctgcagcagcaccagggccaccctcccaaactcctatcctacaggaataacaaccggccctcagggatttcagagagattatctgcatccaggtcaggaaacacagcctccctgaccattgctggactccagcctgaggacgaggctgactattactgctcagcatgggacaacaccgtcagtggttgggtgttcggcggagggaccagggtgaccgtcctag

SEQ ID NO: 553 - DNA, 351 bp, synthetic construct
  source 1..351: mol_type = other DNA
caggttcaattagtgcagtctggtgctgaagtgaaaaagcccggctcaagtgttaaagtaagctgtaaggcgagcggtggtactttcagttcatacgccattagctgggtgcgacaggctcctggtcagggcctcgaatggatgggcggcattatcacaatcttcggtactgcaaattatgcccagaaatttcagggtagagtcacaattaccgcagatgagagcacgaacaccgcctacatggaactgagtagcctgcgttccgaagatacagctgtgtattactgtgcgcgcggtggtggtggtcgttttgacgtttggggccaggggaccttagtcactgtgtctagc

SEQ ID NO: 554 - DNA, 331 bp, synthetic construct
  source 1..331: mol_type = other DNA
tcctatgagctgactcagccaccctcagtgtctgggacccccgggcagagggtcaccatctcttgttctggaagcacctccaacatcggaaataatgctctaaactggtaccagaaactcccagggacggcccccaaactcctcatctatagtcttaatcagcgtccctcaggggtccctgaccgattctctggctccaagtctggcacctcagcctccctggccatcagtgggctccagtctgaggatgaggctgattattactgtgaagcatgggatgacagcctgagtggtccggtgttcggcggagggaccaaggtgaccgtcctag

SEQ ID NO: 555 - DNA, 351 bp, synthetic construct
  source 1..351: mol_type = other DNA
caggttcaattagtgcagtctggtgctgaagtgaaaaagcccggctcaagtgttaaagtaagctgtaaggcgagcggaggtccatttcgctcatacgccattagctgggtgcgacaggctcctggtcagggcctcgaatggatgggcggcattatcccaatcttcggcactgcaaattatgcccagaaatttcagggtagagtcacaattaccgcagatgaaagtacgtcaactgcatacatggaactgagtagcctgcgttccgaagatacagctgtgtattactgtgcgcgcggtggtgtttacagttttgatgtgtggggccaggggaccttagtcactgtgtctagc

SEQ ID NO: 556 - DNA, 331 bp, synthetic construct
  source 1..331: mol_type = other DNA
cagtctgggctgactcagccaccctcagcgtctgggacccccgggcagagggtcaccatttcttgttctggaagcggctccaacgtcggaagtaatgttgtaaattggtaccagcatctcccaggaacggcccccaaactcctcatctatcgtaataatcagcggccctcaggggtccctgaccgattctctggctccaagtctggcacctcagcctccctggccatcagtgggctccagtctgaggatgaggctgattattattgtgcagcatgggatgacagactgaatggctttgtctttggtactgggacgaaggtcaccgtcctga

SEQ ID NO: 557 - DNA, 375 bp, synthetic construct
  source 1..375: mol_type = other DNA
caggttcaattagtgcagtctggtgctgaagtgaaaaagcccggctcaagtgttaaagtaagctgtaaggcgagcggtgttcctttcagttcttacgccattagctgggtgcgacaggctcctggtcagggcctcgaatggatgggcggcatcagcccactgtttggtactgcaaattatgcccagaaatttcagggtagagtcacaattaccgcagaccagagcacgtcaaccgtctacatggaactgagtagcctgcgttccgaagatacagctgtgtattactgtgcgcgcggtctgggtacatacagtcctagtctgtaccctcgtggtatggacgtttggggccaggggaccttagtcactgtgtctagc

SEQ ID NO: 558 - DNA, 331 bp, synthetic construct
  source 1..331: mol_type = other DNA
ctgcctgtgctgactcagccaccctcagcgtctgggacccccggacagagtgtcaccatctcttgttctggaagcagctccaacatcggcagaaatgatgttaactggtaccagcaattcccgggaagggcccccaaactcctcatctatggtcgtgatgagcggcccttcggggtccctgcccgattctctggctccaagtctggcacctcagcctccctggccatcagtgggctccagtctgaggatgaggctgattattactgtgctgcatgggatgccagtctgatgatctatgtcttcggaactgggaccacggtcaccgtcctgg

SEQ ID NO: 559 - DNA, 366 bp, synthetic construct
  source 1..366: mol_type = other DNA
caggttcaattagtgcagtctggtgctgaagtgaaaaagcccggctcaagtgttaaagtaagctgtaaggcgagcggagtgacctttagttcatacgccattagctgggtgcgacaggctcctggtcagggcctcgaatggatgggcggcatcagccctatgttcggcactgcaaattatgcccagaaatttcagggtagagtcacaattaccgcagacgaaagtacgaatactgtctatatggaactgagtagcctgcgttccgaagatacagctgtgtattactgtgcgcgcggtcgtgcttacctgagtgttcgtggtagtttcgacgtgtggggccaggggaccttagtcactgtgtctagc

SEQ ID NO: 560 - DNA, 331 bp, synthetic construct
  source 1..331: mol_type = other DNA
tcctatgagctgactcagccaccctcagtgtctgggacccccgggcagagggtcaccatctcttgttctggaagcagctccaacatcggaagtaacactgtaaactggtaccagcagctcccaggaacggcccccaaactcctcatctatagtaataatcagcggccctcaggggtccctgaccgattctctggctccaagtctggcacctcagcctccctggccatcagtgggctccagtctgaggatgaggctgattattactgtgcagcatgggatgacagcctgaatggttatgtcttcggaactgggaccaaggtcaccgtcctag

SEQ ID NO: 561 - DNA, 351 bp, synthetic construct
  source 1..351: mol_type = other DNA
caggttcaattagtgcagtctggtgctgaagtgaaaaagcccggctcaagtgttaaagtaagctgtaaggcgagcggtgtgattttcagttcttacgccattagctgggtgcgacaggctcctggtcagggcctcgaatggatgggcggcatcatcccaatctttggcactgcaaattatgcccagaaatttcagggtagagtcacaattaccgcagataaaagtacgtcaactgcctatatggaactgagtagcctgcgttccgaagatacagctgtgtattactgtgcgcgcggtggtagtggtagtttcgacgtttggggccaggggaccttagtcactgtgtctagc

SEQ ID NO: 562 - DNA, 331 bp, synthetic construct
  source 1..331: mol_type = other DNA
cagcctgggctgactcagccaccctcagcgtctgggacccccgggcagagggtcaccatctcttgttctggaagcagttccaacctcggaagtaattatgtcttctggtaccagcacctcccaggagcggcccccaaactcctcatctatagaaatagtcagcggccctctggggtccctgaccgattctctggctccaagtctggcacctcagcctccctggccatcagtgggctccagtctgaggatgaggctgattattactgtgcagcatgggatgacagcctgaatggtgtggtattcggcggagggaccaagctgaccgtcctag

SEQ ID NO: 563 - DNA, 375 bp, synthetic construct
  source 1..375: mol_type = other DNA
caggttcaattagtgcagtctggtgctgaagtgaaaaagcccggctcaagtgttaaagtaagctgtaaggcgagcggagtgactttcagctcttacgccattagctgggtgcgacaggctcctggtcagggcctcgaatggatgggcggcatcagccctgtgtttggtactgcaaattatgcccagaaatttcagggtagagtcacaattaccgcagatgatagtacgaataccgcctacatggaactgagtagcctgcgttccgaagatacagctgtgtattactgtgcgcgcagtcgtggttacacagttagtagtctggctggtcgttacttcgaccagtggggccaggggaccttagtcactgtgtctagc

SEQ ID NO: 564 - DNA, 325 bp, synthetic construct
  source 1..325: mol_type = other DNA
gaaacgacactcacgcagtctccaggcaccctgtccttgtctccaggggaaagagcctccctctcctgcaaggccagtgagagtctttgcagcacttgcttggcctggtaccagcagaaacctggccaggctcccaggctcatcgtctatggtgcaaccagcagggccactggcatcccagacaggttcagtggcagtgggtctgggacagacttcactctcaccatcagcagactggagcctgaagattttgcagtgtattactgtcagcagtatggtagctcacctcagacgttcggccaagggaccaaggtggaaatcaaac

SEQ ID NO: 565 - DNA, 351 bp, synthetic construct
  source 1..351: mol_type = other DNA
caggttcaattagtgcagtctggtgctgaagtgaaaaagcccggctcaagtgttaaagtaagctgtaaggcgagcggaggcacttttagctcatacgccattagctgggtgcgacaggctcctggtcagggcctcgaatggatgggcggcatcgtgccactgtttggcactgcaaattatgcccagaaatttcagggtagagtcacaattaccgcagacgaaagtaccagcactgcatatatggaactgagtagcctgcgttccgaagatacagctgtgtattactgtgcgcgcggtctgggtctgtactttgacgtgtggggccaggggaccttagtcactgtgtctagc

SEQ ID NO: 566 - DNA, 328 bp, synthetic construct
  source 1..328: mol_type = other DNA
cagactgtggtgactcaggagccctcactgactgtgtccccaggagagacagtcactctcacctgtgcttccagcactggagcagtcaccagtggttactatccaaactggttccagcagaaacctggacaagcacccagggcactgatttatagtacaagcaacaaacactcctggacccctgcccggttctcaggctccctccttgggggcaaagctgccctgacactgtcaggtgtgcagcctgaggacgaggctgagtattattgtctgctctactatggtggtccttgggtgttcggcggagggaccaagttgaccgtcctgg

SEQ ID NO: 567 - DNA, 366 bp, synthetic construct
  source 1..366: mol_type = other DNA
caggttcaattagtgcagtctggtgctgaagtgaaaaagcccggctcaagtgttaaagtaagctgtaaggcgagcggtggtactttcagctcatacgccattagctgggtgcgacaggctcctggtcagggcctcgaatggatgggcggcattatcccaatcttcggtactgcaaattatgcccagaaatttcagggtagagtcacaattaccgcagacgaaagcacgaacaccgcctacatggaactgagtagcctgcgttccgaagatacagctgtgtattactgtgcgcgcgttcgtggtggttacggtccttacggtgactttgacgtttggggccaggggaccttagtcactgtgtctagc

SEQ ID NO: 568 - DNA, 331 bp, synthetic construct
  source 1..331: mol_type = other DNA
cagcctgggctgactcagccaccctcagcgtctgggacccccgggcagagggtcaccatctcttgttctggaagcagctccaacatcggaagtcattctgtgaactggtaccggcagctcccaggaacggccccccaactcctcatctatggtaacagcaatcggccctcaggggtccctgaccgattctctggctccaagtctggcacctcagcgtccctggccatcagtgggctccagtctgaggatgaggctgattatttctgtgcggcatgggatgacggcctgagtggttgggtgttcggcggagggaccaaattgaccgtcctag

SEQ ID NO: 569 - DNA, 369 bp, synthetic construct
  source 1..369: mol_type = other DNA
caggttcaattagtgcagtctggtgctgaagtgaaaaagcccggctcaagtgttaaagtaagctgtaaggcgagcggtggcccttttagctcatacgccattagctgggtgcgacaggctcctggtcagggcctcgaatggatgggcggcattagcccaatcttcggcactgcaaattatgcccagaaatttcagggtagagtcacaattaccgcagataagagtacgaacaccgcatacatggaactgagtagcctgcgttccgaagatacagctgtgtattactgtgcgcgcggtcgtagttacatcgttagtgttagtcctggttttgacgtgtggggccaggggaccttagtcactgtgtctagc

SEQ ID NO: 570 - DNA, 334 bp, synthetic construct
  source 1..334: mol_type = other DNA
cagtctgtgctgactcagccaccctccgcgtccgggtctcctggacagtcagtcaccatctcctgcactggaaccagcagtgacgttggtggttataactatgtctcctggtaccaacagtacccaggcaaagcccccaaactcatgatttatgaggtcagtaagcggccctcaggggtccctgatcgtttctctggctccaagtctggcacctcagcctccctggccatcagtgagctccaatctgaggatgaggctgattattactgtgcatcatgggatgacagcctgaatgcttatgtcttcggaagtgggaccaaggtcaccgtcctgg

SEQ ID NO: 571 - DNA, 369 bp, synthetic construct
  source 1..369: mol_type = other DNA
caggttcaattagtgcagtctggtgctgaagtgaaaaagcccggctcaagtgttaaagtaagctgtaaggcgagcggaggcattttcagttcatacgccattagctgggtgcgacaggctcctggtcagggcctcgaatggatgggcggcatcagcgcaatctttggtactgcaaattatgcccagaaatttcagggtagagtcacaattaccgcagatgagagtaccagcaccgcatatatggaactgagtagcctgcgttccgaagatacagctgtgtattactgtgcgcgcgacagtggtatcgctagtggttacacagcttacatggattattggggccaggggaccttagtcactgtgtctagc

SEQ ID NO: 572 - DNA, 325 bp, synthetic construct
  source 1..325: mol_type = other DNA
tcttctgagctgactcaggaccctgctgtgtctgtggccttgggacagacagtcaggatcacatgccaaggagacagcctcagaacctcttacgcaagctggtaccagcagaagccaggccagtcccctgtactggtcatctatcaaagtactaagcggccctcagggatccctgagcgattctctgcctccagctcaggaaacacagcttccctgaccatcactggggctcaggcggaagatgaggctgactattactgtaactcccggggcagcgggggtaacccctatgtcttcggaactgggaccaaggtcaccgtccttg

SEQ ID NO: 573 - DNA, 351 bp, synthetic construct
  source 1..351: mol_type = other DNA
caggttcaattagtgcagtctggtgctgaagtgaaaaagcccggctcaagtgttaaagtaagctgtaaggcgagcggtggcattttccgttcatacgccattagctgggtgcgacaggctcctggtcagggcctcgaatggatgggcggcattatcccaatgttcggtactgcaaattatgcccagaaatttcagggtagagtcacaattaccgcagatgagagtacgactactgtctatatggaactgagtagcctgcgttccgaagatacagctgtgtattactgtgcgcgcggtgctggtagtacatttgatgtgtggggccaggggaccttagtcactgtgtctagc

SEQ ID NO: 574 - DNA, 331 bp, synthetic construct
  source 1..331: mol_type = other DNA
cagtctgtgctgactcagccaccctcagcgtctgggacccccgggcagagggtcaccatctcttgttctggaagcagctccaacatcggaagtaatactgtaaactggtaccagcagctcccaggaacggcccccagactcctcatctatagtaataatcagcggccctcaggggtccctgaccgattctctggctccaagtctggcacctcagcctccctggccatcagtgggctccagtctgaggatgaggctgattattactgtgcagcatgggatgacagcctgaatggtcgggtgttcggcggagggaccaagctgaccgtcctag

SEQ ID NO: 575 - DNA, 363 bp, synthetic construct
  source 1..363: mol_type = other DNA
caggttcaattagtgcagtctggtgctgaagtgaaaaagcccggctcaagtgttaaagtaagctgtaaggcgagcggtggtaccttcagctcatacgccattagctgggtgcgacaggctcctggtcagggcctcgaatggatgggcggcattaaccctatctttggtactgcaaattatgcccagaaatttcagggtagagtcacaattaccgcagatgagagcacgaatactgcctacatggaactgagtagcctgcgttccgaagatacagctgtgtattactgtgcgcgcggtgagagtgcttactacagtcgtaattacgatgtgtggggccaggggaccttagtcactgtgtctagc

SEQ ID NO: 576 - DNA, 331 bp, synthetic construct
  source 1..331: mol_type = other DNA
tcctatgagctgactcagccaccctcggtgtccaagggcttgagacagaccgccacactcacctgcactgggaacagcagcaatgttggcaaccaaggagcatcttggctgcagcagcaccagggccaccctcccaaactcctatcctacaggaatgacaaccggccctcagggatctcagagagattctctgcatccaggtcaggaaatacagcctccctgaccattactggactccagcctgaggacgaggctgactattactgctcagcatgggacaacagcctcagtgcttgggtgttcggtggagggaccaagctgaccgtcctag

SEQ ID NO: 577 - DNA, 369 bp, synthetic construct
  source 1..369: mol_type = other DNA
caggttcaattagtgcagtctggtgctgaagtgaaaaagcccggctcaagtgttaaagtaagctgtaaggcgagcggtgtgacttttagctcatacgccattagctgggtgcgacaggctcctggtcagggcctcgaatggatgggcggcatcagcccaatgttcggcactgcaaattatgcccagaaatttcagggtagagtcacaattaccgcagatgagagcacgaataccgcatatatggaactgagtagcctgcgttccgaagatacagctgtgtattactgtgcgcgcggtggtggttactaccctgctggtgttggtcgttatgatgtttggggccaggggaccttagtcactgtgtctagc

SEQ ID NO: 578 - DNA, 340 bp, synthetic construct
  source 1..340: mol_type = other DNA
gacatcgtgatgacccagtctccagactccctggctgtgtctctgggcgagagggccaccatcaactgcaagtccagccagaatgttttatacagctccaacaataagaataacttagcttggtaccaacaaagaccaggacagcctcctaaagtgctcctttattgggcatctacccgggcatccggggtccctgaccgattcagtggcagcgggtctgggacagatttcactctcaccatcaacagccttcaggctgaagatgtggcactttattactgtcaacaatattatggtaaacccttcactttcggccctgggaccaaagtggagatcaaac

SEQ ID NO: 579 - DNA, 363 bp, synthetic construct
  source 1..363: mol_type = other DNA
caggttcaattagtgcagtctggtgctgaagtgaaaaagcccggctcaagtgttaaagtaagctgtaaggcgagcggaggtacctttagctcatacgccattagctgggtgcgacaggctcctggtcagggcctcgaatggatgggcggcattacccctctgttcggcactgcaaattatgcccagaaatttcagggtagagtcacaattaccgcagacgatagtacgtcaactgcatatatggaactgagtagcctgcgttccgaagatacagctgtgtattactgtgcgcgcggtcctacactgtacagtcctcctgtttttgatgtgtggggccaggggaccttagtcactgtgtctagc

SEQ ID NO: 580 - DNA, 331 bp, synthetic construct
  source 1..331: mol_type = other DNA
cagactgtggtgactcaggagccatcgttctcagtgtcccctggagggacaatcaccctcacttgtggcttgagttctggctcagtctctactactaattatcccagctggtaccagcagaccccaggccgaactccacgcacgctcatctacaacacaaacactcgctcttctggggtccctgatcgcttctctggctccatccttgggaacaaagctgccctcaccatcacgggggcccaggcaggtgatgaatctgattattactgtgttttatatatgggtcgtggcatttatgtcttcggaagtgggaccaaggtctccgtcctgg

SEQ ID NO: 581 - DNA, 369 bp, synthetic construct
  source 1..369: mol_type = other DNA
caggttcaattagtgcagtctggtgctgaagtgaaaaagcccggctcaagtgttaaagtaagctgtaaggcgagcggaggcacttttcgctcttacgccattagctgggtgcgacaggctcctggtcagggcctcgaatggatgggcggcatcatgccaatctttggtactgcaaattatgcccagaaatttcagggtagagtcacaattaccgcagacgagagtacgacaaccgtgtacatggaactgagtagcctgcgttccgaagatacagctgtgtattactgtgcgcgcggtgctggtgttagtgctggtcctagttggccttttgacgtttggggccaggggaccttagtcactgtgtctagc

SEQ ID NO: 582 - DNA, 331 bp, synthetic construct
  source 1..331: mol_type = other DNA
cagcctgggctgactcagccaccctcggtgtccaaggacttgaggcagaccgccacactcacctgcactgggaacagcaacaatgttggcaaacaaggagctacttggctgcagcagcaccagggccaccctcccaaactcctatcctacaggaataacaaccggccctcagggatctcagagagattctctgcatccaggtcaggagacacagcctccctgaccattactggcctccagcctgaggacgaggctgactattactgctcagcatgggacagcagcctcagtgtatgggtgttcggcggagggaccaagctgaccgtcctag

SEQ ID NO: 583 - DNA, 369 bp, synthetic construct
  source 1..369: mol_type = other DNA
caggttcaattagtgcagtctggtgctgaagtgaaaaagcccggctcaagtgttaaagtaagctgtaaggcgagcggtggtaccttcagctcatacgccattagctgggtgcgacaggctcctggtcagggcctcgaatggatgggcggcattagccctatgtttggtactgcaaattatgcccagaaatttcagggtagagtcacaattaccgcagatgagagcacgtcaaccgtgtacatggaactgagtagcctgcgttccgaagatacagctgtgtattactgtgcgcgcagtcgtggttacaatgttgctgctagtttcggtttcgatgtgtggggccaggggaccttagtcactgtgtctagc

SEQ ID NO: 584 - DNA, 322 bp, synthetic construct
  source 1..322: mol_type = other DNA
gaaattgtgttgacgcagtctccatccttcctgtctgcatctgtaggagacagagtcaccatcacttgccgggccagtcagtacattgatcgtagcttacactggtaccagcagaaaccagatcagtctccaaagctcctcatcaagtatgcttctcagtccatctcaggggtcccctcgaggttcagtggcagtggatctgggacagatttcagcctcaccatcaatagcctggaaactgaagatgctgcaacctattactgccatcagaccagtagtttgccgtggacattcggccaagggaccacggtggaaatcaaac

SEQ ID NO: 585 - DNA, 363 bp, synthetic construct
  source 1..363: mol_type = other DNA
caggttcaattagtgcagtctggtgctgaagtgaaaaagcccggctcaagtgttaaagtaagctgtaaggcgagcggtggcccatttagctcatacgccattagctgggtgcgacaggctcctggtcagggcctcgaatggatgggcggcatcatccctatcttcggcactgcaaattatgcccagaaatttcagggtagagtcacaattaccgcagatgaaagtacgtcaaccgcctatatggaactgagtagcctgcgttccgaagatacagctgtgtattactgtgcgcgcggtacagactacagtggttaccgtggttttgacgtttggggccaggggaccttagtcactgtgtctagc

SEQ ID NO: 586 - DNA, 331 bp, synthetic construct
  source 1..331: mol_type = other DNA
cagactgtggtgactcaggagccatcgttctcagtgtcccctggagggacagtcacactcacctgtgctttgagttctggctcagtctccagttttaactacgccagctggtaccagcagaccccaggccaggcgccacgcacactcatctccaacacaaacactcgctcttctggggtccctgatcgcttctctggctccatccttgggaacaaagctaccctcaccatcacgggggcccaggcagatgatgaatctcattattactgtgcactgtatgtgggtggtggcatttccgtgttcggcggagggaccaagttgaccgtcctag

SEQ ID NO: 587 - DNA, 348 bp, synthetic construct
  source 1..348: mol_type = other DNA
caggttcaattagtgcagtctggtgctgaagtgaaaaagcccggctcaagtgttaaagtaagctgtaaggcgagcggtgttacttttagctcatacgccattagctgggtgcgacaggctcctggtcagggcctcgaatggatgggcggcatcaccccaatctttggcactgcaaattatgcccagaaatttcagggtagagtcacaattaccgcagatcagagtacgagcactgcatacatggaactgagtagcctgcgttccgaagatacagctgtgtattactgtgcgcgcggtggtggtgttttcgacgtttggggccaggggaccttagtcactgtgtctagc

SEQ ID NO: 588 - DNA, 331 bp, synthetic construct
  source 1..331: mol_type = other DNA
tcctatgagctgactcagccaccctcggtgtctggagccccccgacagagggtcaccatctcctgttctggaagcagctccaacatcggaaataatgctgtaaactggtaccagcagctcccaggaaaggctcccaaactcctcatctattatgatgatatgctgccctcaggggtctctgaccgattctctggctccaagtctggctcctcagcctccctggccatcagtgggctccagtctgaggatgaggctgactattattgtgcagcatgggatgacagcctgagcggtccggttttcggcggagggaccaacctgaccgtcctag

SEQ ID NO: 589 - DNA, 366 bp, synthetic construct; identical to SEQ ID NO: 413
  source 1..366: mol_type = other DNA

SEQ ID NO: 590 - DNA, 331 bp, synthetic construct; identical to SEQ ID NO: 414
  source 1..331: mol_type = other DNA

SEQ ID NO: 591 - DNA, 363 bp, synthetic construct; identical to SEQ ID NO: 417
  source 1..363: mol_type = other DNA

SEQ ID NO: 592 - DNA, 334 bp, synthetic construct; identical to SEQ ID NO: 418
  source 1..334: mol_type = other DNA

SEQ ID NO: 593 - DNA, 375 bp, synthetic construct; identical to SEQ ID NO: 425
  source 1..375: mol_type = other DNA

SEQ ID NO: 594 - DNA, 331 bp, synthetic construct; identical to SEQ ID NO: 426
  source 1..331: mol_type = other DNA

SEQ ID NO: 595 - DNA, 369 bp, synthetic construct; identical to SEQ ID NO: 427
  source 1..369: mol_type = other DNA

SEQ ID NO: 596 - DNA, 346 bp, synthetic construct; identical to SEQ ID NO: 428
  source 1..346: mol_type = other DNA

SEQ ID NO: 597 - DNA, 375 bp, synthetic construct; identical to SEQ ID NO: 433
  source 1..375: mol_type = other DNA

SEQ ID NO: 598 - DNA, 331 bp, synthetic construct; identical to SEQ ID NO: 434
  source 1..331: mol_type = other DNA

SEQ ID NO: 599 - DNA, 366 bp, synthetic construct; identical to SEQ ID NO: 451
  source 1..366: mol_type = other DNA

SEQ ID NO: 600 - DNA, 322 bp, synthetic construct; identical to SEQ ID NO: 452
  source 1..322: mol_type = other DNA

SEQ ID NO: 601 - protein, 117 aa, synthetic construct
QVQLVQSGAEVKKPGSSVKVSCKASGGTFSSYAISWVRQAPGQGLEWMGGIITIFGTANYAQKFQGRVTITADKSTSTAYMELSSLRSEDTAVYYCARGATGFYDVWGQGTLVTVSS

SEQ ID NO: 602 - protein, 110 aa, synthetic construct
LPVLTQPPSASGTPGQRVTISCSGSSSNIGSNTVNWYQQLPGTAPKLLIYSNNQRPSGVPDRFSGSKSGTSASLAISGLQSEDEADYYCAAWDDSLNGPVFGGGTKLTVL

SEQ ID NO: 603 - protein, 123 aa, synthetic construct
QVQLVQSGAEVKKPGSSVKVSCKASGVTFSSYAISWVRQAPGQGLEWMGGISPIFGTANYAQKFQGRVTITADESTSTAYMELSSLRSEDTAVYYCARGREYYASNGDSFDVWGQGTLVTVSS

SEQ ID NO: 604 - protein, 109 aa, synthetic construct
QPVLTQPPSVSVAPGKTASISCEGNNIATKSVHWYQQKSGHAPVVVVYHDSDRPSGVPDRFSGSKSGTSASLAISGLRSEDEADYYCAAWDDSLSGPWVFGGGTKLTVL

SEQ ID NO: 605 - protein, 123 aa, synthetic construct
QVQLVQSGAEVKKPGSSVKVSCKASGGTFSSYAISWVRQAPGQGLEWMGGISAIFGTANYAQKFQGRVTITADESTRTAYMELSSLRSEDTAVYYCARGSGYYVAASGAFDVWGQGTLVTVSS

SEQ ID NO: 606 - protein, 110 aa, synthetic construct
QPGLTQPPSVSKGLRQTATLTCTGNINNVGDQGAGWLQQHQGRPPKLLSYRNSNRPSGVSERFSASRSGNTASLTITGLQPEDEADYYCSAWDSSLSDWVFGGGTKLTVL

SEQ ID NO: 607 - protein, 127 aa, synthetic construct
QVQLVQSGAEVKKPGSSVKVSCKASGGIFSSYAISWVRQAPGQGLEWMGGITPIFGTANYAQKFQGRVTITADESTRTAYMELSSLRSEDTAVYYCARDLSRDSLNLPGSSPGYDLWGQGTLVTVSS

SEQ ID NO: 608 - protein, 107 aa, synthetic construct
ETTLTQSPGTLSLSPGERATLSCRASQSVSSNLAWYQQKPGQAPRLLIYGASTRATGIPARFSGSGSGTEFTLTISSLQSEDFAVYYCQQYSSSPYTFGQGTKLEIK

SEQ ID NO: 609 - protein, 123 aa, synthetic construct
QVQLVQSGAEVKKPGSSVKVSCKASGVIFSSYAISWVRQAPGQGLEWMGGISPIFGTANYAQKFQGRVTITADESTSTAYMELSSLRSEDTAVYYCARSRGYAPGTSFHYDVWGQGTLVTVSS

SEQ ID NO: 610 - protein, 108 aa, synthetic construct
LPVLTQAPSMSVAPGKTASITCGGDNIGSKSVHWYQQKPGQAPVLVMYYDSDRPSGIPERFSGSNSGNTATLTISRVEAGDEADYFCQLWDHTNSHVVFGGRTKLTVL

SEQ ID NO: 611 - protein, 121 aa, synthetic construct
QVQLVQSGAEVKKPGSSVKVSCKASGGTFSSYAISWVRQAPGQGLEWMGGISPIFGTANYAQKFQGRVTITSDESTSTAYMELSSLRSEDTAVYYCARDQGGTRGNYFDVWGQGTLVTVSS

SEQ ID NO: 612 - protein, 110 aa, synthetic construct
QPVLTQPPSVSKGLRQTATVTCTGNSNNVGNQGAAWLQQHQGHPPKLLSYRNNNRPSGISERLSASRSGNTASLTIAGLQPEDEADYYCSAWDNTVSGWVFGGGTRVTVL

SEQ ID NO: 613 - protein, 117 aa, synthetic construct
QVQLVQSGAEVKKPGSSVKVSCKASGGTFSSYAISWVRQAPGQGLEWMGGIITIFGTANYAQKFQGRVTITADESTNTAYMELSSLRSEDTAVYYCARGGGGRFDVWGQGTLVTVSS

SEQ ID NO: 614 - protein, 110 aa, synthetic construct
SYELTQPPSVSGTPGQRVTISCSGSTSNIGNNALNWYQKLPGTAPKLLIYSLNQRPSGVPDRFSGSKSGTSASLAISGLQSEDEADYYCEAWDDSLSGPVFGGGTKVTVL

SEQ ID NO: 615 - protein, 117 aa, synthetic construct
QVQLVQSGAEVKKPGSSVKVSCKASGGPFRSYAISWVRQAPGQGLEWMGGIIPIFGTANYAQKFQGRVTITADESTSTAYMELSSLRSEDTAVYYCARGGVYSFDVWGQGTLVTVSS

SEQ ID NO: 616 - protein, 110 aa, synthetic construct
QSGLTQPPSASGTPGQRVTISCSGSGSNVGSNVVNWYQHLPGTAPKLLIYRNNQRPSGVPDRFSGSKSGTSASLAISGLQSEDEADYYCAAWDDRLNGFVFGTGTKVTVL

SEQ ID NO: 617 - protein, 125 aa, synthetic construct
QVQLVQSGAEVKKPGSSVKVSCKASGVPFSSYAISWVRQAPGQGLEWMGGISPLFGTANYAQKFQGRVTITADQSTSTVYMELSSLRSEDTAVYYCARGLGTYSPSLYPRGMDVWGQGTLVTVSS

SEQ ID NO: 618 - protein, 110 aa, synthetic construct
LPVLTQPPSASGTPGQSVTISCSGSSSNIGRNDVNWYQQFPGRAPKLLIYGRDERPFGVPARFSGSKSGTSASLAISGLQSEDEADYYCAAWDASLMIYVFGTGTTVTVL

SEQ ID NO: 619 - protein, 122 aa, synthetic construct
QVQLVQSGAEVKKPGSSVKVSCKASGVTFSSYAISWVRQAPGQGLEWMGGISPMFGTANYAQKFQGRVTITADESTNTVYMELSSLRSEDTAVYYCARGRAYLSVRGSFDVWGQGTLVTVSS

SEQ ID NO: 620 - protein, 110 aa, synthetic construct
SYELTQPPSVSGTPGQRVTISCSGSSSNIGSNTVNWYQQLPGTAPKLLIYSNNQRPSGVPDRFSGSKSGTSASLAISGLQSEDEADYYCAAWDDSLNGYVFGTGTKVTVL

SEQ ID NO: 621 - protein, 117 aa, synthetic construct
QVQLVQSGAEVKKPGSSVKVSCKASGVIFSSYAISWVRQAPGQGLEWMGGIIPIFGTANYAQKFQGRVTITADKSTSTAYMELSSLRSEDTAVYYCARGGSGSFDVWGQGTLVTVSS

SEQ ID NO: 622 - protein, 110 aa, synthetic construct
QPGLTQPPSASGTPGQRVTISCSGSSSNLGSNYVFWYQHLPGAAPKLLIYRNSQRPSGVPDRFSGSKSGTSASLAISGLQSEDEADYYCAAWDDSLNGVVFGGGTKLTVL

SEQ ID NO: 623 - protein, 125 aa, synthetic construct
QVQLVQSGAEVKKPGSSVKVSCKASGVTFSSYAISWVRQAPGQGLEWMGGISPVFGTANYAQKFQGRVTITADDSTNTAYMELSSLRSEDTAVYYCARSRGYTVSSLAGRYFDQWGQGTLVTVSS

SEQ ID NO: 624 - protein, 108 aa, synthetic construct
ETTLTQSPGTLSLSPGERASLSCKASESLCSTCLAWYQQKPGQAPRLIVYGATSRATGIPDRFSGSGSGTDFTLTISRLEPEDFAVYYCQQYGSSPQTFGQGTKVEIK

SEQ ID NO: 625 - protein, 117 aa, synthetic construct
QVQLVQSGAEVKKPGSSVKVSCKASGGTFSSYAISWVRQAPGQGLEWMGGIVPLFGTANYAQKFQGRVTITADESTSTAYMELSSLRSEDTAVYYCARGLGLYFDVWGQGTLVTVSS

SEQ ID NO: 626 - protein, 109 aa, synthetic construct
QTVVTQEPSLTVSPGETVTLTCASSTGAVTSGYYPNWFQQKPGQAPRALIYSTSNKHSWTPARFSGSLLGGKAALTLSGVQPEDEAEYYCLLYYGGPWVFGGGTKLTVL

SEQ ID NO: 627 - protein, 122 aa, synthetic construct
QVQLVQSGAEVKKPGSSVKVSCKASGGTFSSYAISWVRQAPGQGLEWMGGIIPIFGTANYAQKFQGRVTITADESTNTAYMELSSLRSEDTAVYYCARVRGGYGPYGDFDVWGQGTLVTVSS

SEQ ID NO: 628 - protein, 110 aa, synthetic construct
QPGLTQPPSASGTPGQRVTISCSGSSSNIGSHSVNWYRQLPGTAPQLLIYGNSNRPSGVPDRFSGSKSGTSASLAISGLQSEDEADYFCAAWDDGLSGWVFGGGTKLTVL

SEQ ID NO: 629 - protein, 123 aa, synthetic construct
QVQLVQSGAEVKKPGSSVKVSCKASGGPFSSYAISWVRQAPGQGLEWMGGISPIFGTANYAQKFQGRVTITADKSTNTAYMELSSLRSEDTAVYYCARGRSYIVSVSPGFDVWGQGTLVTVSS

SEQ ID NO: 630 - protein, 111 aa, synthetic construct
QSVLTQPPSASGSPGQSVTISCTGTSSDVGGYNYVSWYQQYPGKAPKLMIYEVSKRPSGVPDRFSGSKSGTSASLAISELQSEDEADYYCASWDDSLNAYVFGSGTKVTVL

SEQ ID NO: 631 - protein, 123 aa, synthetic construct
QVQLVQSGAEVKKPGSSVKVSCKASGGIFSSYAISWVRQAPGQGLEWMGGISAIFGTANYAQKFQGRVTITADESTSTAYMELSSLRSEDTAVYYCARDSGIASGYTAYMDYWGQGTLVTVSS

SEQ ID NO: 632 - protein, 108 aa, synthetic construct
SSELTQDPAVSVALGQTVRITCQGDSLRTSYASWYQQKPGQSPVLVIYQSTKRPSGIPERFSASSSGNTASLTITGAQAEDEADYYCNSRGSGGNPYVFGTGTKVTVL

SEQ ID NO: 633 - protein, 117 aa, synthetic construct
QVQLVQSGAEVKKPGSSVKVSCKASGGIFRSYAISWVRQAPGQGLEWMGGIIPMFGTANYAQKFQGRVTITADESTTTVYMELSSLRSEDTAVYYCARGAGSTFDVWGQGTLVTVSS

SEQ ID NO: 634 - protein, 110 aa, synthetic construct
QSVLTQPPSASGTPGQRVTISCSGSSSNIGSNTVNWYQQLPGTAPRLLIYSNNQRPSGVPDRFSGSKSGTSASLAISGLQSEDEADYYCAAWDDSLNGRVFGGGTKLTVL

SEQ ID NO: 635 - protein, 121 aa, synthetic construct
QVQLVQSGAEVKKPGSSVKVSCKASGGTFSSYAISWVRQAPGQGLEWMGGINPIFGTANYAQKFQGRVTITADESTNTAYMELSSLRSEDTAVYYCARGESAYYSRNYDVWGQGTLVTVSS

SEQ ID NO: 636 - protein, 110 aa, synthetic construct
SYELTQPPSVSKGLRQTATLTCTGNSSNVGNQGASWLQQHQGHPPKLLSYRNDNRPSGISERFSASRSGNTASLTITGLQPEDEADYYCSAWDNSLSAWVFGGGTKLTVL

SEQ ID NO: 637 - protein, 123 aa, synthetic construct
QVQLVQSGAEVKKPGSSVKVSCKASGVTFSSYAISWVRQAPGQGLEWMGGISPMFGTANYAQKFQGRVTITADESTNTAYMELSSLRSEDTAVYYCARGGGYYPAGVGRYDVWGQGTLVTVSS

SEQ ID NO: 638 - protein, 113 aa, synthetic construct
DIVMTQSPDSLAVSLGERATINCKSSQNVLYSSNNKNNLAWYQQRPGQPPKVLLYWASTRASGVPDRFSGSGSGTDFTLTINSLQAEDVALYYCQQYYGKPFTFGPGTKVEIK

SEQ ID NO: 639 - protein, 121 aa, synthetic construct
QVQLVQSGAEVKKPGSSVKVSCKASGGTFSSYAISWVRQAPGQGLEWMGGITPLFGTANYAQKFQGRVTITADDSTSTAYMELSSLRSEDTAVYYCARGPTLYSPPVFDVWGQGTLVTVSS

SEQ ID NO: 640 - protein, 110 aa, synthetic construct
QTVVTQEPSFSVSPGGTITLTCGLSSGSVSTTNYPSWYQQTPGRTPRTLIYNTNTRSSGVPDRFSGSILGNKAALTITGAQAGDESDYYCVLYMGRGIYVFGSGTKVSVL

SEQ ID NO: 641 - protein, 123 aa, synthetic construct
QVQLVQSGAEVKKPGSSVKVSCKASGGTFRSYAISWVRQAPGQGLEWMGGIMPIFGTANYAQKFQGRVTITADESTTTVYMELSSLRSEDTAVYYCARGAGVSAGPSWPFDVWGQGTLVTVSS

SEQ ID NO: 642 - protein, 110 aa, synthetic construct
QPGLTQPPSVSKDLRQTATLTCTGNSNNVGKQGATWLQQHQGHPPKLLSYRNNNRPSGISERFSASRSGDTASLTITGLQPEDEADYYCSAWDSSLSVWVFGGGTKLTVL

SEQ ID NO: 643 - protein, 123 aa, synthetic construct
QVQLVQSGAEVKKPGSSVKVSCKASGGTFSSYAISWVRQAPGQGLEWMGGISPMFGTANYAQKFQGRVTITADESTSTVYMELSSLRSEDTAVYYCARSRGYNVAASFGFDVWGQGTLVTVSS

SEQ ID NO: 644 - protein, 107 aa, synthetic construct
EIVLTQSPSFLSASVGDRVTITCRASQYIDRSLHWYQQKPDQSPKLLIKYASQSISGVPSRFSGSGSGTDFSLTINSLETEDAATYYCHQTSSLPWTFGQGTTVEIK

SEQ ID NO: 645 - protein, 121 aa, synthetic construct
QVQLVQSGAEVKKPGSSVKVSCKASGGPFSSYAISWVRQAPGQGLEWMGGIIPIFGTANYAQKFQGRVTITADESTSTAYMELSSLRSEDTAVYYCARGTDYSGYRGFDVWGQGTLVTVSS

SEQ ID NO: 646 - protein, 110 aa, synthetic construct
QTVVTQEPSFSVSPGGTVTLTCALSSGSVSSFNYASWYQQTPGQAPRTLISNTNTRSSGVPDRFSGSILGNKATLTITGAQADDESHYYCALYVGGGISVFGGGTKLTVL

SEQ ID NO: 647 - protein, 116 aa, synthetic construct
QVQLVQSGAEVKKPGSSVKVSCKASGVTFSSYAISWVRQAPGQGLEWMGGITPIFGTANYAQKFQGRVTITADQSTSTAYMELSSLRSEDTAVYYCARGGGVFDVWGQGTLVTVSS

SEQ ID NO: 648 - protein, 110 aa, synthetic construct
SYELTQPPSVSGAPRQRVTISCSGSSSNIGNNAVNWYQQLPGKAPKLLIYYDDMLPSGVSDRFSGSKSGSSASLAISGLQSEDEADYYCAAWDDSLSGPVFGGGTNLTVL

SEQ ID NO: 649 - protein, 122 aa, synthetic construct; identical to SEQ ID NO: 485

SEQ ID NO: 650 - protein, 110 aa, synthetic construct; identical to SEQ ID NO: 486

SEQ ID NO: 651 - protein, 121 aa, synthetic construct; identical to SEQ ID NO: 489

SEQ ID NO: 652 - protein, 111 aa, synthetic construct; identical to SEQ ID NO: 490

SEQ ID NO: 653 - protein, 125 aa, synthetic construct; identical to SEQ ID NO: 497

SEQ ID NO: 654 - protein, 110 aa, synthetic construct; identical to SEQ ID NO: 498

SEQ ID NO: 655 - protein, 123 aa, synthetic construct; identical to SEQ ID NO: 499

SEQ ID NO: 656 - protein, 115 aa, synthetic construct; identical to SEQ ID NO: 500

SEQ ID NO: 657 - protein, 125 aa, synthetic construct; identical to SEQ ID NO: 505

SEQ ID NO: 658 - protein, 110 aa, synthetic construct; identical to SEQ ID NO: 506

SEQ ID NO: 659 - protein, 122 aa, synthetic construct; identical to SEQ ID NO: 523

SEQ ID NO: 660 - protein, 107 aa, synthetic construct; identical to SEQ ID NO: 524

SEQ ID NO: 661 - protein, 9 aa, synthetic construct
  VARIANT 4..5: note = Any naturally occurring amino acid
  VARIANT 8: note = Any naturally occurring amino acid
CARXXGYXP

SEQ ID NO: 662 - protein, 8 aa, synthetic construct
  VARIANT 4..6: note = Any naturally occurring amino acid
CARXXXYY

SEQ ID NO: 663 - DNA, 21 bp, synthetic construct
  source 1..21: mol_type = other DNA
tggacaagggcttgagtggat

SEQ ID NO: 664 - DNA, 22 bp, synthetic construct
  source 1..22: mol_type = other DNA
ccctggaacttctgtgcgtagt

SEQ ID NO: 665 - DNA, 18 bp, synthetic construct
  source 1..18: mol_type = other DNA
cctatccttggtatagca

SEQ ID NO: 666 - DNA, 21 bp, synthetic construct
  source 1..21: mol_type = other DNA
tggacaagggcttgagtggat

SEQ ID NO: 667 - DNA, 22 bp, synthetic construct
  source 1..22: mol_type = other DNA
ccctggaacttctgtgcgtagt

SEQ ID NO: 668 - DNA, 18 bp, synthetic construct
  source 1..18: mol_type = other DNA
ccctatctttggtacagc

SEQ ID NO: 669 - protein, 11 aa, synthetic construct
WGQGTLVTVSS

SEQ ID NO: 670 - protein, 20 aa, synthetic construct
YYYYYGMDVWGQGTTVTVSS

SEQ ID NO: 671 - protein, 14 aa, synthetic construct
FDVWGQGTLVTVSS

SEQ ID NO: 672 - protein, 16 aa, synthetic construct
GGGSGGGSGGGSGGGS

SEQ ID NO: 673 - protein, 8 aa, synthetic construct
IIPIFGTA

SEQ ID NO: 674 - protein, 8 aa, synthetic construct
ISPIFGTA

SEQ ID NO: 675 - protein, 8 aa, synthetic construct
IIPMFGTA

SEQ ID NO: 676 - protein, 8 aa, synthetic construct
IIPIFRTA

SEQ ID NO: 677 - DNA, 354 bp, synthetic construct
  source 1..354: mol_type = other DNA
caggtgcagctggtgcagtctgggggaggcgtggtccaacctgggaggtccctgagactctcctgtgtagcctctgagttcaccttcaatacttatggcatgcactgggtccgccaggctccaggcaagggactggagtgggtggcagctatttcatatgatggaactaagaaattttatgcagactccctgaagggccgattcaccatctccagagacaattccaagaacacgttgtatctccaaatgaacagcctgagatctgaggacacggccgtgtattactgtgcgagaagtggtgactccgatgcttttgatatctggggccaagggacaatggtcaccgtctcctca

SEQ ID NO: 678 - protein, 118 aa, synthetic construct
QVQLVQSGGGVVQPGRSLRLSCVASEFTFNTYGMHWVRQAPGKGLEWVAAISYDGTKKFYADSLKGRFTISRDNSKNTLYLQMNSLRSEDTAVYYCARSGDSDAFDIWGQGTMVTVSS

SEQ ID NO: 679 - DNA, 321 bp, synthetic construct
  source 1..321: mol_type = other DNA
tcctatgagctgactcagccaccctcagtgtccgtgtccccaggacagacagccaccatcacctgctctggagatgaattgggggataaatttgctttctggtatcaacaaaagccaggccagtcccctgtgctggtcatctatcaagatagtaagaggccctcagggatccctgagcgattctctggctccaactctgggaacacagccactctgaccatcagcgggacccaggctctggatgaggctgactattactgtcaggcgtgggacagcaacagttatgtcttcggaactgggaccaaggtcaccgtcctaggt

SEQ ID NO: 680 - protein, 106 aa, synthetic construct
SYELTQPPSVSVSPGQTATITCSGDELGDKFAFWYQQKPGQSPVLVIYQDSKRPSGIPERFSGSNSGNTATLTISGTQALDEADYYCQAWDSNSYVFGTGTKVTVL

SEQ ID NO: 681 - DNA, 360 bp, synthetic construct
  source 1..360: mol_type = other DNA
gaggtgcagctggtgcagtctggggctgaggtgaaggagcctgggtcctcggtgaaggtctcctgcaaggcttctgggggcaccttcggcagttatgctatcaactgggtgcgacaggcccctggacaaaggcttgagtggatgggatggatcgacgctgccaatggtaacacaaaatattcacagaagttccagggcagagtcaccattaccggagacacatccgcgagcacagcctacatggaactgagcagcctgagatctgaagacacggctgtgtattactgtgcgagagataggtggatgactacgcgggcttttgatatctggggccaagggacaatggtcaccgtctcttca

SEQ ID NO: 682 - protein, 120 aa, synthetic construct
EVQLVQSGAEVKEPGSSVKVSCKASGGTFGSYAINWVRQAPGQRLEWMGWIDAANGNTKYSQKFQGRVTITGDTSASTAYMELSSLRSEDTAVYYCARDRWMTTRAFDIWGQGTMVTVSS

SEQ ID NO: 683 - DNA, 333 bp, synthetic construct
  source 1..333: mol_type = other DNA
cagcctgtgctgactcagccaccctcagcgtctgggacccccgggcagagggtcaccatctcttgttctggaagcagctccaacatcggaagtaattatgttttctggtaccagcagctcccagggatggcccccaaactcctcatctctaggaataatcagcggccctcaggggtccctgaccgattctctggctccaagtctggcacctcagcctccctggccatcagtgggccccagtctgaggatgaggctgattattactgtgcagcatgggatgacagcctgcgtggtcccgtgttcggcggagggaccagggtgaccgtcctaggt

SEQ ID NO: 684 - protein, 110 aa, synthetic construct
QPVLTQPPSASGTPGQRVTISCSGSSSNIGSNYVFWYQQLPGMAPKLLISRNNQRPSGVPDRFSGSKSGTSASLAISGPQSEDEADYYCAAWDDSLRGPVFGGGTRVTVL

SEQ ID NO: 685 - DNA, 369 bp, synthetic construct
  source 1..369: mol_type = other DNA
caggtgcagctggtgcagtctggggctgaggtgaagaagcctgggtcctcggtgaaggtctcctgcaaggcgtctggaggcactttcagcagctatgcagtcagctgggtgcgacaggcccctggacaaggtcttgagtgggtgggaaggataatccctatttttggtaaggcaaactacgcacagaagttccagggcagagtcacgataaccgcggacaaatccacgagcacagcctatatggaactgagcagcctgagacctgaagacacggccgtatattactgtgcgagagatcaggggatttcggccaatttcaaagatgcttttgatatctggggccaagggaccacggtcaccgtctcctca

SEQ ID NO: 686 - protein, 123 aa, synthetic construct
QVQLVQSGAEVKKPGSSVKVSCKASGGTFSSYAVSWVRQAPGQGLEWVGRIIPIFGKANYAQKFQGRVTITADKSTSTAYMELSSLRPEDTAVYYCARDQGISANFKDAFDIWGQGTTVTVSS

SEQ ID NO: 687 - DNA, 321 bp, synthetic construct
  source 1..321: mol_type = other DNA
gaaacgacactcacgcagtctccagccaccctgtctgtgtctccaggggaaagagccaccctctcctgcagggccagtgagagtgttggcagcaacttagcctggtaccagcagaaacctggccaggctcccagcctcctcatctatggtgcatccaccagggccactggtatcccagacagattcagtggcagtgggtctgggacagacttcactctcaccatcagcagcctgcagtctgaagattttgcagcttattattgtcagcagtataataactggccactcaccttcggccctgggaccaaagtggaaatcaaa

SEQ ID NO: 688 - protein, 107 aa, synthetic construct
ETTLTQSPATLSVSPGERATLSCRASESVGSNLAWYQQKPGQAPSLLIYGASTRATGIPDRFSGSGSGTDFTLTISSLQSEDFAAYYCQQYNNWPLTFGPGTKVEIK

SEQ ID NO: 689 - DNA, 375 bp, synthetic construct
  source 1..375: mol_type = other DNA
caggtgcagctggtgcagtctggggctgaggtgaagaagcctgggtcctcggtgaaggtctcctgcaaggcttctggaggcaccttcagcagctatgctatcagctgggtgcgacaggcccctggacaagggcttgagtggatgggagggatcatccctatctttggtacagcaaactacgcacagaagttccagggcagagtcacgattaccgcggacaaatccacgagcacagcctacatggagctgagcagcctgagatctgaggacacggccgtgtattactgtgcgagggtaggatattgtagtagtaccagctgtcacatcggcgcttttgatatctggggccaagggaccacggtcaccgtctcctca

SEQ ID NO: 690 - protein, 125 aa, synthetic construct
QVQLVQSGAEVKKPGSSVKVSCKASGGTFSSYAISWVRQAPGQGLEWMGGIIPIFGTANYAQKFQGRVTITADKSTSTAYMELSSLRSEDTAVYYCARVGYCSSTSCHIGAFDIWGQGTTVTVSS

SEQ ID NO: 691 - DNA, 321 bp, synthetic construct
  source 1..321: mol_type = other DNA
gaaacgacactcacgcagtctccaggcaccctgtctttgtctccaggggaaagagccaccctctcctgcagggccagtcagagtgttagcagcagcatagcctggtatcagcagaaacctgggcaggctcccaggctcctcatgtttgattcatccaccagggccactggtatcccagacaggttcagtggcagtgggtctgggacagacttcactctcaacatcagcagcctagagcctgaagattttgcagtgtattactgtcagcagtatagtagctcaccttacacttttggccaggggaccaaactggagatcaaa

SEQ ID NO: 692 - protein, 107 aa, synthetic construct
ETTLTQSPGTLSLSPGERATLSCRASQSVSSSIAWYQQKPGQAPRLLMFDSSTRATGIPDRFSGSGSGTDFTLNISSLEPEDFAVYYCQQYSSSPYTFGQGTKLEIK

SEQ ID NO: 693 - DNA, 375 bp, synthetic construct
  source 1..375: mol_type = other DNA
caggtgcagctggtgcagtctggggctgaggtgaagaagcctgggtcctcggtgaaggtctcctgcaaggcttctggaggcaccttcagcagctatgctatcagctgggtgcgacaggcccctggacaagggcttgagtggatgggagggatcatccctatctttggtacagcaaactacgcacagaagttccagggcagagtcacgattaccgcggacaaatccacgagcacagcctacatggagctgagcagcctgagatctgaggacacggccgtgtattactgtgcgagagcctcatattgtagtactaccagctgcgctagtggtgcttttgatatctggggccaaggcaccctggtcaccgtctcctca

SEQ ID NO: 694 - protein, 125 aa, synthetic construct
QVQLVQSGAEVKKPGSSVKVSCKASGGTFSSYAISWVRQAPGQGLEWMGGIIPIFGTANYAQKFQGRVTITADKSTSTAYMELSSLRSEDTAVYYCARASYCSTTSCASGAFDIWGQGTLVTVSS

SEQ ID NO: 695 - DNA, 339 bp, synthetic construct
  source 1..339: mol_type = other DNA
gacatccagatgacccagtctccagactccctggctgtgtctctgggcgagagggccaccatcaactgcaagtccagccagagtgttttatacagctccaacaataagaactacttagcttggtaccagcagaaaccaggacagcctcctaagctgctcatttactgggcatctgcccgggaatccggggtccctgaccgattcagtggcagcgggtctgggacagatttcactctcaccatcagcagcctgcagcctgaagatgtggcaatttattactgtcagcaatattatagtgttccattcactttcggccctgggaccaaagtggagatcaaa

SEQ ID NO: 696 - protein, 113 aa, synthetic construct
DIQMTQSPDSLAVSLGERATINCKSSQSVLYSSNNKNYLAWYQQKPGQPPKLLIYWASARESGVPDRFSGSGSGTDFTLTISSLQPEDVAIYYCQQYYSVPFTFGPGTKVEIK

SEQ ID NO: 697 - DNA, 363 bp, synthetic construct
  source 1..363: mol_type = other DNA
gaggtgcagctggtgcagtctggagctgaggtgaagaagcctggggcctcagtgaaggtttcctgcaaggcttctggatacaccttcaatgtatatgctatcaactgggtgcgacaggcccctggacaagggcttgagtggatgggaaggatcatccctatccttggtatagcaaactacgcacagaagttccagggcagagtcacgattaccgcggacaaatccacgagcacagcctacatggagctgagcagcctgagatctgaggacacggccgtgtattactgtgcgagagattactatggttcgggagctaggggctttgactactggggccagggcaccctggtcaccgtctcctca

SEQ ID NO: 698 - protein, 121 aa, synthetic construct
EVQLVQSGAEVKKPGASVKVSCKASGYTFNVYAINWVRQAPGQGLEWMGRIIPILGIANYAQKFQGRVTITADKSTSTAYMELSSLRSEDTAVYYCARDYYGSGARGFDYWGQGTLVTVSS

SEQ ID NO: 699 - DNA, 333 bp, synthetic construct
  source 1..333: mol_type = other DNA
cagcctgggctgactcagccaccctcggtgtccaagggcttgagacagaccgccacactcacctgcactgggaacagcaacaatgttggcaaccaaggagcagcttggctgcagcagcaccagggccaccctcccaaactcctatcctacacgaataacaaccggccctcagggatctcagagagattatctgcatccaggtcaggaaacacagcctccctggccattactggactccagcctgaggacgaggcagactattactgtgcatcatgggacagcagcctcagtgtttgggtgatcggcggagggaccaagttgaccgtcctaggt

SEQ ID NO: 700 - protein, 110 aa, synthetic construct
QPGLTQPPSVSKGLRQTATLTCTGNSNNVGNQGAAWLQQHQGHPPKLLSYTNNNRPSGISERLSASRSGNTASLAITGLQPEDEADYYCASWDSSLSVWVIGGGTKLTVL

SEQ ID NO: 701 - DNA, 378 bp, synthetic construct
  source 1..378: mol_type = other DNA
gaggtgcagctggtgcagtctggggctgaggtgaagaagcctgggtcctcggtgaaggtctcctgcaaggcttctggaggcaccttcagcagctatgctatcagctgggtgcgacaggcccctggacaagggcttgagtggatgggagggatcatccctatctttggtatagcaaactacgcacagaagttccagggcagagtcacgattaccgcggacaaatccacgagcacagcctacatggagctgagcagcctgagatctgaggacacggccgtgtattactgtgcgagctctaattactatggttcagggagttattatccgcgaagtgcttttgatatctggggccaagggaccacggtcaccgtctcctca

SEQ ID NO: 702 - protein, 126 aa, synthetic construct
EVQLVQSGAEVKKPGSSVKVSCKASGGTFSSYAISWVRQAPGQGLEWMGGIIPIFGIANYAQKFQGRVTITADKSTSTAYMELSSLRSEDTAVYYCASSNYYGSGSYYPRSAFDIWGQGTTVTVSS

SEQ ID NO: 703 - DNA, 321 bp, synthetic construct
  source 1..321: mol_type = other DNA
gaaacgacactcacgcagtctccagccaccctgtctgtgtctccaggggaaagggccatcctctcctgcagggccagtcagagtataagcaatgacttagcctggtaccagcagaaacctggccaggctcccaggctcctcatctatggtgcatccagcagggccactggcatcccagacaggttcagtggcagtgggtctgggacggacttcaccttcaccatcagcagactggagtctgaagattttgcagtgtattactgtcagcagtatggtgtttcacctctcactttcggcggggggaccaaggtggagatcaaa

SEQ ID NO: 704 - protein, 107 aa, synthetic construct
ETTLTQSPATLSVSPGERAILSCRASQSISNDLAWYQQKPGQAPRLLIYGASSRATGIPDRFSGSGSGTDFTFTISRLESEDFAVYYCQQYGVSPLTFGGGTKVEIK

SEQ ID NO: 705 - protein, 8 aa, synthetic construct
EFTFNTYG

SEQ ID NO: 706 - protein, 8 aa, synthetic construct
ISYDGTKK

SEQ ID NO: 707 - protein, 11 aa, synthetic construct
ARSGDSDAFDI

SEQ ID NO: 708 - protein, 8 aa, synthetic construct
GGTFGSYA

SEQ ID NO: 709 - protein, 8 aa, synthetic construct
IDAANGNT

SEQ ID NO: 710 - protein, 13 aa, synthetic construct
ARDRWMTTRAFDI

SEQ ID NO: 711 - protein, 8 aa, synthetic construct
GGTFSSYA

SEQ ID NO: 712 - protein, 8 aa, synthetic construct
IIPIFGKA

SEQ ID NO: 713 - protein, 16 aa, synthetic construct
ARDQGISANFKDAFDI

SEQ ID NO: 714 - protein, 8 aa, synthetic construct
GGTFSSYA

SEQ ID NO: 715 - protein, 18 aa, synthetic construct
ARVGYCSSTSCHIGAFDI

SEQ ID NO: 716 - protein, 18 aa, synthetic construct
ARASYCSTTSCASGAFDI

SEQ ID NO: 717 - protein, 8 aa, synthetic construct
GYTFNVYA

SEQ ID NO: 718 - protein, 8 aa, synthetic construct
IIPILGIA

SEQ ID NO: 719 - protein, 14 aa, synthetic construct
ARDYYGSGARGFDY

SEQ ID NO: 720 - protein, 8 aa, synthetic construct
IIPIFGIA

SEQ ID NO: 721 - protein, 19 aa, synthetic construct
ASSNYYGSGSYYPRSAFDI

SEQ ID NO: 722 - protein, 6 aa, synthetic construct
ELGDKF

SEQ ID NO: 723 - skipped

SEQ ID NO: 724 - protein, 9 aa, synthetic construct
QAWDSNSYV

SEQ ID NO: 725 - protein, 8 aa, synthetic construct
SSNIGSNY

SEQ ID NO: 726 - skipped

SEQ ID NO: 727 - protein, 11 aa, synthetic construct
AAWDDSLRGPV

SEQ ID NO: 728 - protein, 6 aa, synthetic construct
ESVGSN

SEQ ID NO: 729 - skipped

SEQ ID NO: 730 - protein, 9 aa, synthetic construct
QQYNNWPLT

SEQ ID NO: 731 - protein, 6 aa, synthetic construct
QSVSSS

SEQ ID NO: 732 - skipped

SEQ ID NO: 733 - protein, 9 aa, synthetic construct
QQYSSSPYT

SEQ ID NO: 734 - protein, 1255 aa, Middle East Respiratory Syndrome coronavirus
MFIFLLFLTLTSGSDLDRCTTFDDVQAPNYTQHTSSMRGVYYPDEIFRSDTLYLTQDLFLPFYSNVTGFHTINHTFGNPVIPFKDGIYFAATEKSNVVRGWVFGSTMNNKSQSVIIINNSTNVVIRACNFELCDNPFFAVSKPMGTQTHTMIFDNAFNCTFEYISDAFSLDVSEKSGNFKHLREFVFKNKDGFLYVYKGYQPIDVVRDLPSGFNTLKPIFKLPLGINITNFRAILTAFSPAQDIWGTSAAAYFVGYLKPTTFMLKYDENGTITDAVDCSQNPLAELKCSVKSFEIDKGIYQTSNFRVVPSGDVVRFPNITNLCPFGEVFNATKFPSVYAWERKKISNCVADYSVLYNSTFFSTFKCYGVSATKLNDLCFSNVYADSFVVKGDDVRQIAPGQTGVIADYNYKLPDDFMGCVLAWNTRNIDATSTGNYNYKYRYLRHGKLRPFERDISNVPFSPDGKPCTPPALNCYWPLNDYGFYTTTGIGYQPYRVVVLSFELLNAPATVCGPKLSTDLIKNQCVNFNFNGLTGTGVLTPSSKRFQPFQQFGRDVSDFTDSVRDPKTSEILDISPCSFGGVSVITPGTNASSEVAVLYQDVNCTDVSTAIHADQLTPAWRIYSTGNNVFQTQAGCLIGAEHVDTSYECDIPIGAGICASYHTVSLLRSTSQKSIVAYTMSLGADSSIAYSNNTIAIPTNFSISITTEVMPVSMAKTSVDCNMYICGDSTECANLLLQYGSFCTQLNRALSGIAAEQDRNTREVFAQVKQMYKTPTLKYFGGFNFSQILPDPLKPTKRSFIEDLLFNKVTLADAGFMKQYGECLGDINARDLICAQKFNGLTVLPPLLTDDMIAAYTAALVSGTATAGWTFGAGAALQIPFAMQMAYRFNGIGVTQNVLYENQKQIANQFNKAISQIQESLTTTSTALGKLQDVVNQNAQALNTLVKQLSSNFGAISSVLNDILSRLDKVEAEVQIDRLITGRLQSLQTYVTQQLIRAAEIRASANLAATKMSECVLGQSKRVDFCGKGYHLMSFPQAAPHGVVFLHVTYVPSQERNFTTAPAICHEGKAYFPREGVFVFNGTSWFITQRNFFSPQIITTDNTFVSGNCDVVIGIINNTVYDPLQPELDSFKEELDKYFKNHTSPDVDLGDISGINASVVNIQKEIDRLNEVAKNLNESLIDLQELGKYEQYIKWPWYVWLGFIAGLIAIVMVTILLCCMTSCCSCLKGACSCGSCCKFDEDDSEPVLKGVKLHYT

SEQ ID NO: 735 - protein, 8 aa, synthetic construct
IIPIFGTA

SEQ ID NO: 736 - protein, 8 aa, synthetic construct
SNNVGNQG

SEQ ID NO: 737 - protein, 12 aa, synthetic construct
QSVLYSSNNKNY

SEQ ID NO: 738 - skipped

SEQ ID NO: 739 - protein, 9 aa, synthetic construct
QQYYSVPFT

SEQ ID NO: 740 - protein, 6 aa, synthetic construct
QSISND

SEQ ID NO: 741 - protein, 9 aa, synthetic construct
QQYGVSPLT

SEQ ID NO: 742 - skipped

SEQ ID NO: 743 - protein, 11 aa, synthetic construct
ASWDSSLSVWV

SEQ ID NO: 744 - protein, 96 aa, Homo sapiens
QVQLVQSGAEVKKPGSSVKVSCKASGGTFSSYAISWVRQAPGQGLEWMGGIIPIFGTANYAQKFQGRVTITADKSTSTAYMELSSLRSEDTAVYYC

SEQ ID NO: 745 - protein, 96 aa, Homo sapiens
QVQLVQSGAEVKKPGSSVKVSCKASGGTFSSYAISWVRQAPGQGLEWMGRIIPILGIANYAQKFQGRVTITADKSTSTAYMELSSLRSEDTAVYYC

SEQ ID NO: 746 - protein, 96 aa, Homo sapiens
QVQLVESGGGVVQPGRSLRLSCAASGFTFSSYGMHWVRQAPGKGLEWVAVISYDGSNKYYADSVKGRFTISRDNSKNTLYLQMNSLRAEDTAVYYC

SEQ ID NO: 747 - protein, 96 aa, Homo sapiens
QVQLVQSGAEVKKPGASVKVSCKASGYTFTSYAMHWVRQAPGQRLEWMGWINAGNGNTKYSQKFQGRVTITRDTSASTAYMELSSLRSEDTAVYYC

SEQ ID NO: 748 - protein, 87 aa, Homo sapiens
SYELTQPPSVSVSPGQTASITCSGDKLGDKYACWYQQKPGQSPVLVIYQDSKRPSGIPERFSGSNSGNTATLTISGTQAMDEADYYC

SEQ ID NO: 749 - protein, 89 aa, Homo sapiens
QSVLTQPPSASGTPGQRVTISCSGSSSNIGSNYVYWYQQLPGTAPKLLIYRNNQRPSGVPDRFSGSKSGTSASLAISGLRSEDEADYYC

SEQ ID NO: 750 - protein, 88 aa, Homo sapiens
EIVMTQSPATLSVSPGERATLSCRASQSVSSNLAWYQQKPGQAPRLLIYGASTRATGIPARFSGSGSGTEFTLTISSLQSEDFAVYYC

SEQ ID NO: 751 - protein, 94 aa, Homo sapiens
DIVMTQSPDSLAVSLGERATINCKSSQSVLYSSNNKNYLAWYQQKPGQPPKLLIYWASTRESGVPDRFSGSGSGTDFTLTISSLQAEDVAVYYC

SEQ ID NO: 752 - protein, 89 aa, Homo sapiens
EIVLTQSPGTLSLSPGERATLSCRASQSVSSSYLAWYQQKPGQAPRLLIYGASSRATGIPDRFSGSGSGTDFTLTISRLEPEDFAVYYC

SEQ ID NO: 753 - protein, 89 aa, Homo sapiens
QAGLTQPPSVSKGLRQTATLTCTGNSNNVGNQGAAWLQQHQGHPPKLLSYRNNNRPSGISERLSASRSGNTASLTITGLQPEDEADYYC

SEQ ID NO: 754 - protein, 12 aa, Middle East Respiratory Syndrome coronavirus
AAALDTVYRPNI

SEQ ID NO: 755 - protein, 12 aa, Middle East Respiratory Syndrome coronavirus
PAVLDTVYRPNI

SEQ ID NO: 756 - protein, 12 aa, Middle East Respiratory Syndrome coronavirus
ASALDTVYRPNI

SEQ ID NO: 757 - protein, 12 aa, Middle East Respiratory Syndrome coronavirus
AVALDTVYRPNI

SEQ ID NO: 758 - protein, 12 aa, Middle East Respiratory Syndrome coronavirus
AAAFDTVYRPNI

SEQ ID NO: 759 - protein, 12 aa, Middle East Respiratory Syndrome coronavirus
AAALGTVYRPNI

SEQ ID NO: 760 - protein, 12 aa, Middle East Respiratory Syndrome coronavirus
AAALDTAYRPNI

SEQ ID NO: 761 - protein, 12 aa, Middle East Respiratory Syndrome coronavirus
AAALDTVYRPII

SEQ ID NO: 762 - protein, 12 aa, Middle East Respiratory Syndrome coronavirus
AAALDTVYRSNI

SEQ ID NO: 763 - protein, 12 aa, Middle East Respiratory Syndrome coronavirus
AAALDTVYGPNI

SEQ ID NO: 764 - protein, 12 aa, synthetic construct
AAALDTVYSPNT

SEQ ID NO: 765 - protein, 12 aa, Middle East Respiratory Syndrome coronavirus
AAALDTVYTPNI

SEQ ID NO: 766 - protein, 12 aa, Middle East Respiratory Syndrome coronavirus
AAALDTVYKPNI

SEQ ID NO: 767 - protein, 12 aa, Middle East Respiratory Syndrome coronavirus
AAAFDAVYRPNI

SEQ ID NO: 768 - protein, 12 aa, Middle East Respiratory Syndrome coronavirus
AAALDTVYKPNI

SEQ ID NO: 769 - protein, 12 aa, Middle East Respiratory Syndrome coronavirus
AAAFDTVCRPNI

SEQ ID NO: 770 - protein, 12 aa, Middle East Respiratory Syndrome coronavirus
AAALDTVHRPNI

SEQ ID NO: 771 - protein, 112 aa, Homo sapiens
QVQLVQSGGGVVQPGRSLRLSCAASGFTFSSYGMHWVRQAPGKGLEWVAVISYDGSKYYADSVKGRFTISRDNSKNTLYLQMNSLRAEDTAVYYCARDGDVWGQGTTVTVSS

SEQ ID NO: 772 - protein, 121 aa, Homo sapiens
EVQLVESGGGVVQPGRSLRLSCAASGFTFSSYGMHWVRQAPGKGLEWVAVISYDGSNKYYADSVKGRFTISRDNSKNTLYLQVSSLRAEDTAVYYCVRDLVAAAGTAFDIWGQGTTVTVSS

SEQ ID NO: 773 - protein, 120 aa, Homo sapiens
QVQLQQSGPGLVKPSQTLSLTCAVSGDSVSSNFVAWNWIRQSPSRGLEWLGRTYYRSRWYNDYAVSVQSRIRVTPDTSKNQFSLHLDSVTPEDTAVYYCARGQHSGFDFWGQGTLVTVSS

SEQ ID NO: 774 - protein, 126 aa, Homo sapiens
QVQLVQSGAEVKKPGASVKVSCKASGYTFTSYGISWVRQAPGQGLEWMGWISAYNGNTNYAQKLQGRVTMTTDTSTSTAYMELRSLRSDDTAVYYCARDTPGIAARRYYYYGMDVWGQGTTVTVSS

SEQ ID NO: 775 - protein, 121 aa, Homo sapiens
QVQLVQSGGGVVQPGRSLRLSCAASGFTFSSYPMHWVRQAPGKGLEWMTVISSDGRNKYYPDSVKGRFTISRDNSKNTLYLQMNSLRPEDTAVYYCARGGYHDFWSGPDYWGQGTLVTVSS

SEQ ID NO: 776 - protein, 127 aa, Homo sapiens
EVQLVQSGGGLVQPGGSLRLSCAASGFTFSSYAMSWVRQAPGKGLEWVANIKQDGSEKYYVDSVKGRFTISRDNAKNSLYLQMNSLRAEDTAVYYCARDQVSGITIFGGKWRSPDVWGQGTTVTVSS

SEQ ID NO: 777 - protein, 126 aa, Homo sapiens
QVTLKESGGGVVQPGRSLRLSCAASGFTFTNYGLHWVRQAPGKGLEWVAVISHDGTKKYYADSVKGRFTISRDSSENTLYLQMNSLRPEDSALYYCARDGGYCSGGRCYSYGMDVWGQGTTVTVSS

SEQ ID NO: 778 - protein, 122 aa, Homo sapiens
QVQLVQSGGGVVLPGRSLRLSCVASGFTFRRYGMHWVRQAPGKGLEWVSLISYDGSKTFYGESVKGRFTISRDNSKNTLYLQMNSLRAEDTAVYYCARATVTTDGYYYMDVWGKGTTVTVSS

SEQ ID NO: 779 - protein, 89 aa, Homo sapiens
QSVLTQPPSVSPGQTVTISCGSGVSWYQQPGAPKLLIYNRPSGIPDRFSGSKSGNTASLTITGLQAEDAEEYYCSWDVFGGGTKLTVLG

SEQ ID NO: 780 - protein, 111 aa, Homo sapiens
QPVLTQPRSVSGSPGQSVTISCTGTISDVGGHNFVSWYQQNPGKAPKLIIFEVTKRPAGVPDRFSGSKSGNTASLTVSGLQAEDEGEYYCSSYGGSNDVIFGGGTKLSVLG

SEQ ID NO: 781 - protein, 111 aa, Homo sapiens
QSVLTQPPSVSKGLRQTATLTCTGNSNNVGNQGAAWLQQHQGHPPKLLSYRNNNRPSGISERFSASRSGNTASLTITGLQPEDEADYYCSAWDNRLKTYVFGTGGKVTVLG

SEQ ID NO: 782 - protein, 109 aa, Homo sapiens
SSELTQDPAVSVALGQTVRITCQGDSLRKFFASWYQQKPGQAPVLVIYGKNSRPSGIPDRFSGSNSRNTASLTITGAQAEDEGDYYCNSRDSRDNHQVFGAGTKVTVLS

SEQ ID NO: 783 - protein, 108 aa, Homo sapiens
EIVLTQSPATLSVSPGERATLSCRASQSVNTNLAWYQQKPGQAPRLLIYGASSRATGIPDRFSGSGSGTDFTLTISRLEPEDFAVYYCQHYGSSPLTFGGGTKLEIKR

SEQ ID NO: 784 - protein, 107 aa, Homo sapiens
SSELTQDPAVSVALGQTVRITCQGDSLRSYYASWYQQKPGQAPVLVIYGKNNRPSGIPDRFSGSKSHNTAYLTITGAQAEDEADYFCNSRSGSQRVFGGGTKLTVLG

SEQ ID NO: 785 - protein, 111 aa, Homo sapiens
QSVLTQPPSASGTPGQRVTISCSGSRSNIGSNTVNWYQQLPGTAPKLLIYTNNQRPSGVPDRFSGSKSGTSASLAITGLQAEDEADYYCLSFDSSLTSYVFGTGTKVTVLG

SEQ ID NO: 786 - protein, 112 aa, Homo sapiens
QSVLTQPPSASGTPGQRVTISCSGSRSNIGGNTVNWYQQLPGTAPKLLIYANNQRPSGVPDRFSGSKSGTSASLAISGLRSEDEADYYCAAWDDNLSGHVVFGGGTKLTVLR

SEQ ID NO: 787 - protein, 5 aa, Homo sapiens
SYGMH

SEQ ID NO: 788 - protein, 17 aa, Homo sapiens
VISYDGSNKYYADSVKG

SEQ ID NO: 789 - protein, 12 aa, Homo sapiens
DLVAAAGTAFDI

SEQ ID NO: 790 - protein, 14 aa, Homo sapiens
TGTISDVGGHNFVS

SEQ ID NO: 791 - protein, 7 aa, Homo sapiens
EVTKRPA

SEQ ID NO: 792 - protein, 10 aa, Homo sapiens
SSYGGSNDVI

SEQ ID NO: 793 - protein, 7 aa, Homo sapiens
SNFVAWN

SEQ ID NO: 794 - protein, 18 aa, Homo sapiens
RTYYRSRWYNDYAVSVQS

SEQ ID NO: 795 - protein, 8 aa, Homo sapiens
GQHSGFDF

SEQ ID NO: 796 - protein, 13 aa, Homo sapiens
TGNSNNVGNQGAA

SEQ ID NO: 797 - protein, 7 aa, Homo sapiens
RNNNRPS

SEQ ID NO: 798 - protein, 11 aa, Homo sapiens
SAWDNRLKTYV

SEQ ID NO: 799 - protein, 5 aa, Homo sapiens
SYGIS

SEQ ID NO: 800 - protein, 17 aa, Homo sapiens
WISAYNGNTNYAQKLQG

SEQ ID NO: 801 - protein, 17 aa, Homo sapiens
DTPGIAARRYYYYGMDV

SEQ ID NO: 802 - protein, 11 aa, Homo sapiens
QGDSLRKFFAS

SEQ ID NO: 803 - protein, 7 aa, Homo sapiens
GKNSRPS

SEQ ID NO: 804 - protein, 11 aa, Homo sapiens
NSRDSRDNHQV

SEQ ID NO: 805 - protein, 5 aa, Homo sapiens
SYPMH

SEQ ID NO: 806 - protein, 17 aa, Homo sapiens
VISSDGRNKYYPDSVKG

SEQ ID NO: 807 - protein, 12 aa, Homo sapiens
GGYHDFWSGPDY

SEQ ID NO: 808 - protein, 11 aa, Homo sapiens
RASQSVNTNLA

SEQ ID NO: 809 - protein, 7 aa, Homo sapiens
GASSRAT

SEQ ID NO: 810 - protein, 9 aa, Homo sapiens
QHYGSSPLT

SEQ ID NO: 811 - protein, 5 aa, Homo sapiens
SYAMS

SEQ ID NO: 812 - protein, 17 aa, Homo sapiens
NIKQDGSEKYYVDSVKG

SEQ ID NO: 813 - protein, 18 aa, Homo sapiens
DQVSGITIFGGKWRSPDV

SEQ ID NO: 814 - protein, 11 aa, Homo sapiens
QGDSLRSYYAS

SEQ ID NO: 815 - protein, 7 aa, Homo sapiens
GKNNRPS

SEQ ID NO: 816 - protein, 9 aa, Homo sapiens
NSRSGSQRV

SEQ ID NO: 817 - protein, 5 aa, Homo sapiens
NYGLH

SEQ ID NO: 818 - protein, 17 aa, Homo sapiens
VISHDGTKKYYADSVKG

SEQ ID NO: 819 - protein, 17 aa, Homo sapiens
DGGYCSGGRCYSYGMDV

SEQ ID NO: 820 - protein, 13 aa, Homo sapiens
SGSRSNIGSNTVN

SEQ ID NO: 821 - protein, 7 aa, Homo sapiens
TNNQRPS

SEQ ID NO: 822 - protein, 11 aa, Homo sapiens
LSFDSSLTSYV

SEQ ID NO: 823 - protein, 5 aa, Homo sapiens
RYGMH

SEQ ID NO: 824 - protein, 17 aa, Homo sapiens
LISYDGSKTFYGESVKG

SEQ ID NO: 825 - protein, 13 aa, Homo sapiens
ATVTTDGYYYMDV

SEQ ID NO: 826 - protein, 13 aa, Homo sapiens
SGSRSNIGGNTVN

SEQ ID NO: 827 - protein, 7 aa, Homo sapiens
ANNQRPS

SEQ ID NO: 828 - protein, 12 aa, Homo sapiens
AAWDDNLSGHVV

SEQ ID NO: 829 - skipped

SEQ ID NO: 830 - protein, 38 aa, Homo sapiens
MEGISIYTSDNYTEEMGSGDYDSMKEPCFREENANFNK

SEQ ID NO: 831 - protein, 38 aa, Macaca mulatta
MEGISIYTSDNYTEEMGSGDYDSIKEPCFREENANFNR

SEQ ID NO: 832 - protein, 38 aa, Mus musculus
MEPISIYTSDNYSEEVGSGDYDSNKEPCFDEENVHFNR

SEQ ID NO: 833 - protein, 14 aa, Homo sapiens
DAVANWYFGNFLCK

SEQ ID NO: 834 - protein, 14 aa, Macaca mulatta
DAVANWYFGNFLCK

SEQ ID NO: 835 - protein, 14 aa, Mus musculus
DAMADWYFKNFLCK

SEQ ID NO: 836 - protein, 27 aa, Homo sapiens
NVSEADDRYICDRFYPNDLWVVVFQFQ

SEQ ID NO: 837 - protein, 27 aa, Macaca mulatta
SVSEADDRYICDRFYPNDLWVVVFQFQ

SEQ ID NO: 838 - protein, 30 aa, Mus musculus
DVSQGDIAQGRYICDRLYPDSLWMVVFQFQ

SEQ ID NO: 839 - protein, 21 aa, Homo sapiens
DSFILLEIIKQGCEFENTVHK

SEQ ID NO: 840 - protein, 21 aa, Macaca mulatta
DSFILLEIIKQGCEFENTVHK

SEQ ID NO: 841 - protein, 21 aa, Mus musculus
DSFILLGVIKQGCDFESIVHK

SEQ ID NO: 842 - protein, 365 aa, Homo sapiens
MEGISIYTSDNYTEEMGSGDYDSMKEPCFREENANFNKIFLPTIYSIIFLTGIVGNGLVILVMGYQKKLRSMTDKYRLHLSVADLLFVITLPFWAVDAVANWYFGNFLCKAVHVIYTVNLYSSVLILAFISLDRYLAIVHATNSQRPRKLLAEKVVYVGVWIPALLLTIPDFIFANVSEADDRYICDRFYPNDLWVVVFQFQHIMVGLILPGIVILSCYCIIISKLSHSKGHQKRKALKTTVILILAFFACWLPYYIGISIDSFILLEIIKQGCEFENTVHKWISITEALAFFHCCLNPILYAFLGAKFKTSAQHALTSVSRGSSLKILSKGKRGGHSSVSTESESSSFHSSGTETSQVAPALES

SEQ ID NO: 843 - protein, 341 aa, Homo sapiens
MEPCFREENANFNKIFLPTIYSIIFLTGIVGNGLVILVMGYQKKLRSMTDKYRLHLSVADLLFVITLPFWAVDAVANWYFGNFLCKAVHVIYTVNLYSSVLILAFISLDRYLAIVHATNSQRPRKLLAEKVVYVGVWIPALLLTIPDFIFANVSEADDRYICDRFYPNDLWVVVFQFQHIMVGLILPGIVILSCYCIIISKLSHSKGHQKRKALKTTVILILAFFACWLPYYIGISIDSFILLEIIKQGCEFENTVHKWISITEALAFFHCCLNPILYAFLGAKFKTSAQHALTSVSRGSSLKILSKGKRGGHSSVSTESESSSFHSSGTETSQVAPALES

SEQ ID NO: 844 - protein, 334 aa, Homo sapiens
ENANFNKIFLPTIYSIIFLTGIVGNGLVILVMGYQKKLRSMTDKYRLHLSVADLLFVITLPFWAVDAVANWYFGNFLCKAVHVIYTVNLYSSVLILAFISLDRYLAIVHATNSQRPRKLLAEKVVYVGVWIPALLLTIPDFIFANVSEADDRYICDRFYPNDLWVVVFQFQHIMVGLILPGIVILSCYCIIISKLSHSKGHQKRKALKTTVILILAFFACWLPYYIGISIDSFILLEIIKQGCEFENTVHKWISITEALAFFHCCLNPILYAFLGAKFKTSAQHALTSVSRGSSLKILSKGKRGGHSSVSTESESSSFHSSGTETSQVAPALES

SEQ ID NO: 845 - protein, 121 aa, Homo sapiens
QVQLVQSGGGLVQPGGSLRLSCAASGFTFSSYAMSWVRQAPGKGLEWVSAISGSGGSTYYADSVKGRFTISRDNSKNTLYLQMNSLRAEDTAVYYCARNGNYRGSLAFDIWGQGTLVTVSS

SEQ ID NO: 846 - protein, 113 aa, Homo sapiens
QSVLTQPPSVSGAPGQRVTISCTGSSSNIGAGYDVHWYQQLPGTAPKLLIYGNNNRPSGVPDRFSGSKSGTSASLAITGLQAEDEADYYCQSYDSSLSAWVVFGGGTKLTVLG

SEQ ID NO: 847 - protein, 119 aa, Homo sapiens
EVQLVQSGGGVVQPGGSLRLSCAASGFPFSSYAMSWVRQAPGKGLEWVSAISANGGTTYYADSVKGRFTISRDNSKNTLYLQMNSLRAEDTAVYYCANNGNYRGAFDIWGQGTMVTVSS

SEQ ID NO: 848 - protein, 119 aa, Homo sapiens
QVQLVQSGGGLVQPGGSLRLSCAASGFPFSSYAMSWVRQAPGKGLEWVSAISANGGTTYYADSVKGRFTISRDNSKNTLYLQMNSLRAEDTAVYYCANNGNYRGAFDIWGQGTMVTVSS

SEQ ID NO: 849 - protein, 119 aa, Homo sapiens; identical to SEQ ID NO: 848

SEQ ID NO: 850 - protein, 119 aa, Homo sapiens
QVQLVQSGGGLVQPGGSLRLSCAASEFTFGTYAMTWVRQAPGKGLEWVSAVSGSGGSTYYADSVKGRFTISRDNSRNTLYLQMNSLRADDTAVYYCARGPVLRYGFDIWGQGTMVTVSS

SEQ ID NO: 851 - protein, 119 aa, Homo sapiens
QVQLVQSGGGVVQPGGSLRLSCAASGFPFSSYAMSWVRQAPGKGLEWVSAISANGGTTYYADSVKGRFTISRDNSKNTLYLQMNSLRAEDTAVYYCANNGNYRGAFDIWGQGTMVTVSS

SEQ ID NO: 852 - protein, 118 aa, Homo sapiens
QVQLQESGGGLVQPGGSLRLSCAASGFTFSIYAMSWVRQAPGKGLEWVSAISGSGGGTYHADSVKGRFTISRDNSKNTLYLQMNSLRAEDTAVYYCAKFSAYSGYDLWGQGTLVTVSS

SEQ ID NO: 853 - protein, 119 aa, Homo sapiens
QVQLVQSGGGLVRPGGSLRLSCAASGFPFSSYAMSWVRQAPGKGLEWVSAISANGGTTYYADSVKGRFTISRDNSKNTLYLQMNSLRAEDTAVYYCANNGNYRGAFDIWGQGTTVTVSS

SEQ ID NO: 854 - protein, 119 aa, Homo sapiens; identical to SEQ ID NO: 848

SEQ ID NO: 855 - protein, 119 aa, Homo sapiens
EVQLVQSGGGLVQPGGSLRLSCAASGFTFSSYAMSWVRQAPGKGLEWVSAISANGGTTYYADSVKGRFTISRDNSKNTLYLQMNSLRAEDTAVYYCANNGNYRGAFDIWGQGTTVTVSS

SEQ ID NO: 856 - protein, 116 aa, Homo sapiens
QVQLVQSGGGLVQPGGSLRLSCAASGFTFSSYAMSWVRQAPGKGLEWVSAISGSGGSTYYADSVKGRFTISRDNSKNTLYLQMNSLRAEDTAVYYCARAAAGFDYWGQGTLVTVSS

SEQ ID NO: 857 - protein, 119 aa, Homo sapiens
QVQLQESGGGLVQPGGSLRLSCAASGFTFSSYAMSWVRQAPGKGLEWVSAISGSGGSTYYADSVKGRFTISRDNSKNTLYLQMNSLRAEDTAVYYCAKIGRYSSSLGYWGQGTLVTVSS

SEQ ID NO: 858 - protein, 122 aa, Homo sapiens
QVQLVQSGGGVVQPGRSLRLSCAASGFTFSSYGMHWVRQAPGKGLEWVAVISYDGSNKYYADSVKGRFTISRDNSKNTLYLQMNSLRAEDTAVYYCAREAPYSSSLDAFDIWGQGTMVTVSS

SEQ ID NO: 859 - protein, 118 aa, Homo sapiens
QVQLQESGGGLVQPGGSLRLSCAASGFTFSSYAMSWVRQAPGKGLEWVSAISGSGGSTYYADSVKGRFTISRDNSKNTLYLQMNSLRAEDTAVYYCARSHSSGGFDYWGQGTLVTVSS

SEQ ID NO: 860 - protein, 118 aa, Homo sapiens; identical to SEQ ID NO: 859

SEQ ID NO: 861 - protein, 116 aa, Homo sapiens
QVTLKESGGGVVQPGTSLRLSCAASGFTFSNYAMTWVRQAPGKGLEWVGLISYDGSVTHYTDSVKGRFTISRDNAKNSLYLQMNTLRADDTAVYYCARGSGYQEHWGQGTLVTVSS

SEQ ID NO: 862 - protein, 118 aa, Homo sapiens
QVQLVQSGGGLVQPGGSLRLSCAASGFTFSSYAMSWVRQAPGKGLEWVSAISGSGGSTYYADSVKGRFTISRDNSKNTLYLQMNSLRAEDTAVYYCATYGDYGSLDYWGQGTLVTVSS

SEQ ID NO: 863 - protein, 122 aa, Homo sapiens
QVQLVQSGGGLVQPGGSLRLSCAASGFTFSSYAMSWVRQAPGKGLEWVSAISGSGVSTYYADSVKGRFTISRDNSKNTLYLQMNSLRAEDTAVYYCAKYCSSTSCYRGMDVWGKGTLVTVSS

SEQ ID NO: 864 - protein, 119 aa, Homo sapiens
QVQLVQSGGGVVQPGRSLRLSCAASGFTFSSYGMHWVRQAPGKGLEWVAVISYDGSNKYYADSVKGRFTISRDNSKNTLYLQMNSLRAEDTAVYYCARGRAARPPFDYWGQGTLVTVSS

SEQ ID NO: 865 - protein, 119 aa, Homo sapiens; identical to SEQ ID NO: 851

SEQ ID NO: 866 - protein, 121 aa, Homo sapiens
QVQLVQSGGGLVQPGGSLRLSCAAPEFTFSKYAMSWVRQAPGKGLEWVSGISGSGGSTYYADSVKGRFTISRDNSKNTLYLQMNSLRAEDTAVYYCAKSSRSGYFLPLDYWGQGTLVTVSS

SEQ ID NO: 867 - protein, 118 aa, Homo sapiens
EVQLVESGGGVVQPGRSLRLSCAASGFTFSSYGMHWVRQAPGKGLEWVSAISGSGGSTYYADSVKGRFTISRDNAKNTLYLQMNSLRAEDTAVYYCARAAVTGGFDPWGQGTLVTVSS

SEQ ID NO: 868 - protein, 112 aa, Homo sapiens
QSVLTQPPSVSGAPGQRVTISCTGSSSNIGAGFDVHWYQQLPGTAPKLLIYGNTNRPSGVPDRFSGSKSGTSASLAITGLQAEDETDYYCQSYDSRLSAWVFGGGTKLTVLG

SEQ ID NO: 869 - protein, 111 aa, Homo sapiens
QSVLTQPPSVSGAPGQRVTISCTGSSSNIGAGYDVHWYQQLPGTAPKLLIYGNSNRPSGVPDRFSGSKSGSSASLAITGLQAEDEAHYYCQSYDRSLSWVFGGGTKLTVLG

SEQ ID NO: 870 - protein, 112 aa, Homo sapiens
QSVLTQPPSVSGAPGQRVTISCTGSSSNIGAGYDVHWYQQLPGTAPKLLIYGNTNRPSGVPDRFSGSKSGTSASLAIIGLQADDEADYYCQSYDSTLRVWMFGGGTKLTVLG

SEQ ID NO: 871 - protein, 112 aa, Homo sapiens
QSVLTQPPSVSGAPGQRITISCTGSRSNIGADYDVHWYQQLPGTAPKLLIYANNNRPSGVPGRFSASKSGTSASLAISGLQAEDEADYYCQSYDSSLRAWVFGGGTKLAVLG

SEQ ID NO: 872 - protein, 112 aa, Homo sapiens
QSVLTQPPSVSGAPGQRITISCTGSRSNIGADYDVHWYQQLPGTAPKLLIYANNNRPSGVPDRFSGSKSGTSASLAITGLQAEDETDYFCQSYDSSLSAWVFGGGTKVTVLG

SEQ ID NO: 873 - protein, 111 aa, Homo sapiens
QSVLTQPPSVSGAPGQRVTISCTGSSSNIGRGYNVHWYQQLPGTAPKLLIYDNTNRPSGVPARFSGSKSATSASLTITGLQADDEADYYCQSYDSGLRWVFGGGTKLTLLG

SEQ ID NO: 874 - protein, 111 aa, Homo sapiens
QSVLTQPPSVSGAPGQRITISCTGSSSNIGAGYDVHWYQQVPGKAPKVVIYGNNNRPSGVPDRFSGSKSGASASLAITGLQTEDEADYYCQSYDKSLTWVFGGGTKVTVLG

SEQ ID NO: 875 - protein, 111 aa, Homo sapiens
QSVLTQPPSVSGAPGQRITISCTGTSSNIGAGYDVHWYQQLPGAAPRVLIYGNNNRPSGVPDRFSGSKSGTSASLAITGLQSEDEADYYCQSYDKSLSWVFGGGTKLTVLR

SEQ ID NO: 876 - protein, 112 aa, Homo sapiens
QSVLTQPPSVSGAPGQRVTISCTGSSSNIGAGFDVHWYQQLPGTAPRLLIYGNNNRPSGVPDRFSGSKSGTSASLAITGLQAEDETDYFCQSYDSSLSAWVFGGGTKVTVLR

SEQ ID NO: 877 - protein, 112 aa, Homo sapiens
QSVLTQPPSVSGAPGQRVTISCTGSSSNIGRGYNVHWYQQLPGTAPKLLIYDDTNRPSGVPHRFSGSKSGTSASLAITGLQAEDEADYYCQSYDSSLRAWVFGGGTKLAVLG

SEQ ID NO: 878 - protein, 111 aa, Homo sapiens
QSVLTQPPSVSGAPGQRVTISCTGSSSNIGRGYNVHWYQQLPGTAPKLLIYDNTNRPSGVPARFSGSKSATSASLAITGLQADDEADYYCQSYDSGLRWVFGGGTKLTLLR

SEQ ID NO: 879 - protein, 111 aa, Homo sapiens
QSVLTQPPSVSGAPGQRVTISCTGSSSNIGRGYNVHWYQQLPGTAPKLLIYGNSNRPSGVPDRFSGSSSGNTASLTITGAQAEDEADYYCHSRDNNGHHIFGGGTKLTVLS

SEQ ID NO: 880 - protein, 112 aa, Homo sapiens
QSVLTQPPSVSGAPGQRVTISCTGSSSNIGRGYNVHWYQQLPGTAPKLLIYGNTNRPSGVPDRFSGSKSGTSASLAITGLQAEDEGDYYCQSYDSSLSAWVFGGGTKLTVLG

SEQ ID NO: 881 - protein, 112 aa, Homo sapiens
  VARIANT 83: note = Any naturally occurring amino acid
QSVLTQPPSVSGAPGQRVTISCTGSSSNIGRGYNVHWYQQLPGTAPKLLIYGNTNRPSGVPDRFSGSKSGTSASLAITGLQAXDEGDYYCQSYDSSLSAWVFGGGTKLTVLG

SEQ ID NO: 882 - protein, 110 aa, Homo sapiens
LPVLTQPPSVSVAPGQTARITCGGNNIGSKSVHWYQQKPGQAPVLVIYYDSDRPSGIPERFSGSNSGNTATLTISRVEAGDEADYYCQVWDSSSDHHVVFGGGTKLTVLG

SEQ ID NO: 883 - protein, 112 aa, Homo sapiens
QSVLTQPPSVSGAPGQRVTISCTGSSSNIGAGYDVHWYQQLPGTAPKLLIYANNNRPSGVPDRFSGSKSGTSASLAITGLQAEDEADYYCQSYDSSLRAWVFGGGTKLAVLG

SEQ ID NO: 884 - protein, 112 aa, Homo sapiens; identical to SEQ ID NO: 883

SEQ ID NO: 885 - protein, 111 aa, Homo sapiens
QPVLTQPPSASGTPGQRVTISCSGSSSNIGSNYVYWYQQLPGTAPKLPIYRNNQRPSGVPDRFSGSKSGTSASLAISGLRSEDEADYYCAAWDDSLNGVVFGGGTKLTVLR

SEQ ID NO: 886 - protein, 112 aa, Homo sapiens
QSVLTQPPSVSGAPGQRVTISCTGSSSNIGAGYDVHWYQHLPGTAPKLLIYGNSNRPSGVPDRFSGSKSGTSASLAITGLQAEDETDYFCQSYDSSLSAWVFGGGTKVTVLG

SEQ ID NO: 887 - protein, 109 aa, Homo sapiens
SSELTQDPAVSVALGQTVRITCQGNSLRYYYPSWYQQKPGQAPVLVIYGKNNRPSGIPDRFSGSSSGNTASLTITGTQAEDEADYYCSSRDNTDNRVVFGGGTKLTVLG

SEQ ID NO: 888 - protein, 109 aa, Homo sapiens
QPGLTQPPSVSVAPGQTARITCGGDNIGRKSVHWYQQRPGQAPILVIRDDRDRPSGIPERFSGSSSVNTATLIISRVEAGDEADYYCQVWDSSSKHYVFGPGTKVTALG

SEQ ID NO: 889 - protein, 458 aa, Homo sapiens
MAPLCPSPWLPLLIPAPAPGLTVQLLLSLLLLMPVHPQRLPRMQEDSPLGGGSSGEDDPLGEEDLPSEEDSPREEDPPGEEDLPGEEDLPGEEDLPEVKPKSEEEGSLKLEDLPTVEAPGDPQEPQNNAHRDKEGDDQSHWRYGGDPPWPRVSPACAGRFQSPVDIRPQLAAFCPALRPLELLGFQLPPLPELRLRNNGHSVQLTLPPGLEMALGPGREYALQLHLHWGAAGRPGSEHTVEGHRFPAEIHVVHLSTAFARVDEALGRPGGLAVLAAFLEEGPEENSAYEQLLSRLEEIAEEGSETQVPGLDISALLPSDFSRYFQYEGSLTTPPCAQGVIWTVFNQTVMLSAKQLHTLSDTLWGPGDSRLQLNFRATQPLNGRVIEASFPAGVDSSPRAAEPVQLNSCLAAGDILALVFGLLFAVTSVAFLVQMRRQHRRGTKGGVSYRPAEVAETGA

SEQ ID NO: 890 - protein, 437 aa, Mus musculus
MASLGPSPWAPLSTPAPTAQLLLFLLLQVSAQPQGLSGMQGEPSLGDSSSGEDELGVDVLPSEEDAPEEADPPDGEDPPEVNSEDRMEESLGLEDLSTPEAPEHSQGSHGDEKGGGHSHWSYGGTLLWPQVSPACAGRFQSPVDIRLERTAFCRTLQPLELLGYELQPLPELSLSNNGHTVQLTLPPGLKMALGPGQEYRALQLHLHWGTSDHPGSEHTVNGHRFPAEIHVVHLSTAFSELHEALGRPGGLAVLAAFLQESPEENSAYEQLLSHLEEISEEGSKIEIPGLDVSALLPSDFSRYYRYEGSLTTPPCSQGVIWTVFNETVKLSAKQLHTLSVSLWGPRDSRLQLNFRATQPLNGRTIEASFPAAEDSSPEPVHVNSCFTAGDILALVFGLLFAVTSIAFLLQLRRQHRHRSGTKDRVSYSPAEMTETGA

SEQ ID NO: 891 - DNA, 38 bp, synthetic construct
  source 1..38: mol_type = other DNA; note = Chemically synthesized primer
atcgacgcgtgcctgagcgaggtgcagctggtgcagtc

SEQ ID NO: 892 - DNA, 32 bp, synthetic construct
  source 1..32: mol_type = other DNA; note = Chemically synthesized primer
caatggtcaccgtctcttcagctagcaccagg

SEQ ID NO: 893 - DNA, 35 bp, synthetic construct
  source 1..35: mol_type = other DNA; note = Chemically synthesized primer
atcccaagcttaagccagtctgtgctgactcagcc

SEQ ID NO: 894 - DNA, 31 bp, synthetic construct
  source 1..31: mol_type = other DNA; note = Chemically synthesized primer
ggagggaccaaattgaccgtcctaggtcagc

SEQ ID NO: 895 - DNA, 41 bp, synthetic construct
  source 1..41: mol_type = other DNA; note = Chemically synthesized primer
tagggcacgcgtgtgctgagcgaggtgcagctggtgcagtc

SEQ ID NO: 896 - DNA, 32 bp, synthetic construct
  source 1..32: mol_type = other DNA; note = Chemically synthesized primer
tctagtgctagctgaagagacggtgaccattg

SEQ ID NO: 897 - DNA, 35 bp, synthetic construct
  source 1..35: mol_type = other DNA; note = Chemically synthesized primer
ctagcaagcttatcccagtctgtgctgactcagcc

SEQ ID NO: 898 - DNA, 26 bp, synthetic construct
  source 1..26: mol_type = other DNA; note = Chemically synthesized primer
atagcacctaggacggtcagcttggt

SEQ ID NO: 899 - protein, 5 aa, synthetic construct
  source 1..5: note = Portion of CDR1 heavy chain sequence
SYAMS

SEQ ID NO: 900-901 - skipped (2 entries)

SEQ ID NO: 902 - protein, 17 aa, synthetic construct
  source 1..17: note = Portion of CDR2 heavy chain sequence
  VARIANT 4..5: note = Any naturally occurring amino acid
  VARIANT 8: note = Any naturally occurring amino acid
  VARIANT 10..11: note = Any naturally occurring amino acid
AISXXGGXTXXADSVKG

SEQ ID NO: 903 - protein, 17 aa, synthetic construct
  source 1..17: note = Portion of CDR2 heavy chain sequence
AISGSGGSTTTADSVKG

SEQ ID NO: 904 - protein, 13 aa, synthetic construct
  source 1..13: note = Portion of CDR3 heavy chain sequence
  VARIANT 9: note = Any naturally occurring amino acid
NGNYRGSLXAFDI

SEQ ID NO: 905 - protein, 14 aa, synthetic construct
  source 1..14: note = Portion of CDR1 heavy chain sequence
TGSSSNIGAGYDVH

SEQ ID NO: 906 - protein, 7 aa, synthetic construct
  source 1..7: note = Portion of CDR2 heavy chain sequence
GNNNRPS

SEQ ID NO: 907 - protein, 12 aa, synthetic construct
  source 1..12: note = Portion of CDR3 heavy chain sequence
QSYDSSLSAWVV

SEQ ID NO: 908 - protein, 6 aa, synthetic construct
  source 1..6: note = Consensus sequence
EEDLPE

SEQ ID NO: 909 - protein, 10 aa, synthetic construct
  source 1..10: note = Portion of CDR3 heavy chain sequence
NGNYRGAFDI

SEQ ID NO: 910 - protein, 5 aa, synthetic construct
  source 1..5: note = variable heavy chain, CDR1
TYAMT

SEQ ID NO: 911 - protein, 5 aa, synthetic construct
  source 1..5: note = variable heavy chain, CDR1
IYAMS

SEQ ID NO: 912 - protein, 5 aa, synthetic construct
  source 1..5: note = variable heavy chain, CDR1
SYGMH

SEQ ID NO: 913 - protein, 5 aa, synthetic construct
  source 1..5: note = variable heavy chain, CDR1
NYAMT

SEQ ID NO: 914 - protein, 5 aa, synthetic construct
  source 1..5: note = variable heavy chain, CDR1
KYAMS

SEQ ID NO: 915 - protein, 17 aa, synthetic construct
  source 1..17: note = variable heavy chain, CDR2
AISANGGTTYYADSVKG

SEQ ID NO: 916 - protein, 17 aa, synthetic construct
  source 1..17: note = variable heavy chain, CDR2
AVSGSGGSTYYADSVKG

SEQ ID NO: 917 - protein, 17 aa, synthetic construct
  source 1..17: note = variable heavy chain, CDR2
AISGSGGGTYHADSVKG

SEQ ID NO: 918 - protein, 17 aa, synthetic construct
  source 1..17: note = variable heavy chain, CDR2
AISGSGGSTYYADSVKG

SEQ ID NO: 919 - protein, 17 aa, synthetic construct
  source 1..17: note = variable heavy chain, CDR2
VISYDGSNKYYADSVKG

SEQ ID NO: 920 - protein, 17 aa, synthetic construct
  source 1..17: note = variable heavy chain, CDR2
LISYDGSVTHYTDSVKG

SEQ ID NO: 921 - protein, 17 aa, synthetic construct
  source 1..17: note = variable heavy chain, CDR2
AISGSGVSTYYADSVKG

SEQ ID NO: 922 - protein, 17 aa, synthetic construct
  source 1..17: note = variable heavy chain, CDR2
GISGSGGSTYYADSVKG

SEQ ID NO: 923 - protein, 10 aa, synthetic construct
  source 1..10: note = variable heavy chain, CDR3
GPVLRYGFDI

SEQ ID NO: 924 - protein, 9 aa, synthetic construct
  source 1..9: note = variable heavy chain, CDR3
FSAYSGYDL

SEQ ID NO: 925 - protein, 7 aa, synthetic construct
  source 1..7: note = variable heavy chain, CDR3
AAAGFDY

SEQ ID NO: 926 - protein, 10 aa, synthetic construct
  source 1..10: note = variable heavy chain, CDR3
IGRYSSSLGY

SEQ ID NO: 927 - protein, 13 aa, synthetic construct
  source 1..13: note = variable heavy chain, CDR3
EAPYSSSLDAFDI

SEQ ID NO: 928 - protein, 9 aa, synthetic construct
  source 1..9: note = variable heavy chain, CDR3
SHSSGGFDY

SEQ ID NO: 929 - protein, 7 aa, synthetic construct
  source 1..7: note = variable heavy chain, CDR3
GSGYQEH

SEQ ID NO: 930 - protein, 9 aa, synthetic construct
  source 1..9: note = variable heavy chain, CDR3
YGDYGSLDY

SEQ ID NO: 931 - protein, 13 aa, synthetic construct
  source 1..13: note = variable heavy chain, CDR3
YCSSTSCYRGMDV

SEQ ID NO: 932 - protein, 10 aa, synthetic construct
  source 1..10: note = variable heavy chain, CDR3
GRAARPPFDY

SEQ ID NO: 933 - protein, 12 aa, synthetic construct
  source 1..12: note = variable heavy chain, CDR3
SSRSGYFLPLDY

SEQ ID NO: 934 - protein, 9 aa, synthetic construct
  source 1..9: note = variable heavy chain, CDR3
AAVTGGFDP

SEQ ID NO: 935 - protein, 14 aa, synthetic construct
  source 1..14: note = variable heavy chain, CDR3
TGSSSNIGAGYDVH

SEQ ID NO: 936 - protein, 14 aa, synthetic construct
  source 1..14: note = variable heavy chain, CDR1
TGSRSNIGADYDVH

SEQ ID NO: 937 - protein, 14 aa, synthetic construct
  source 1..14: note = variable heavy chain, CDR1
TGSSSNIGRGYNVH

SEQ ID NO: 938 - protein, 14 aa, synthetic construct
  source 1..14: note = variable heavy chain, CDR1
TGTSSNIGAGYDVH

SEQ ID NO: 939 - protein, 11 aa, synthetic construct
  source 1..11: note = variable heavy chain, CDR1
GGNNIGSKSVH

SEQ ID NO: 940 - protein, 13 aa, synthetic construct
  source 1..13: note = variable heavy chain, CDR1
SGSSSNIGSNYVY

SEQ ID NO: 941 - protein, 11 aa, synthetic construct
  source 1..11: note = variable heavy chain, CDR1
QGNSLRYYYPS

SEQ ID NO: 942 - protein, 11 aa, synthetic construct
  source 1..11: note = variable heavy chain, CDR1
GGDNIGRKSVH

SEQ ID NO: 943 - protein, 7 aa, synthetic construct
  source 1..7: note = variable heavy chain, CDR2
GNSNRPS

SEQ ID NO: 944 - protein, 7 aa, synthetic construct
  source 1..7: note = variable heavy chain, CDR2
ANNNRPS

SEQ ID NO: 945 - protein, 7 aa, synthetic construct
  source 1..7: note = variable heavy chain, CDR2
DNTNRPS

SEQ ID NO: 946 - protein, 7 aa, synthetic construct
  source 1..7: note = variable heavy chain, CDR2
GNNNRPS

SEQ ID NO: 947 - protein, 7 aa, synthetic construct
  source 1..7: note = variable heavy chain, CDR2
DDTNRPS

SEQ ID NO: 948 - protein, 7 aa, synthetic construct
  source 1..7: note = variable heavy chain, CDR2
YDSDRPS

SEQ ID NO: 949 - protein, 7 aa, synthetic construct
  source 1..7: note = variable heavy chain, CDR2
RNNQRPS

SEQ ID NO: 950 - protein, 7 aa, synthetic construct
  source 1..7: note = variable heavy chain, CDR2
GKNNRPS

SEQ ID NO: 951 - protein, 7 aa, synthetic construct
  source 1..7: note = variable heavy chain, CDR2
DDRDRPS

SEQ ID NO: 952 - protein, 11 aa, synthetic construct
  source 1..11: note = variable heavy chain, CDR3
QSYDSRLSAWV

SEQ ID NO: 953 - protein, 10 aa, synthetic construct
  source 1..10: note = variable heavy chain, CDR3
QSYDRSLSWV

SEQ ID NO: 954 - protein, 11 aa, synthetic construct
  source 1..11: note = variable heavy chain, CDR3
QSYDSTLRVWM

SEQ ID NO: 955 - protein, 11 aa, synthetic construct
  source 1..11: note = variable heavy chain, CDR3
QSYDSSLRAWV

SEQ ID NO: 956 - protein, 11 aa, synthetic construct
  source 1..11: note = variable heavy chain, CDR3
QSYDSSLSAWV

SEQ ID NO: 957 - protein, 10 aa, synthetic construct
  source 1..10: note = variable heavy chain, CDR3
QSYDSGLRWV

SEQ ID NO: 958 - protein, 10 aa, synthetic construct
  source 1..10: note = variable heavy chain, CDR3
QSYDKSLTWV

SEQ ID NO: 959 - protein, 10 aa, synthetic construct
  source 1..10: note = variable heavy chain, CDR3
QSYDKSLSWV

SEQ ID NO: 960 - protein, 11 aa, synthetic construct
  source 1..11: note = variable heavy chain, CDR3
QSYDSSLSAWV

SEQ ID NO: 961 - protein, 10 aa, synthetic construct
  source 1..10: note = variable heavy chain, CDR3
HSRDNNGHHI

SEQ ID NO: 962 - protein, 12 aa, synthetic construct
  source 1..12: note = variable heavy chain, CDR3
QVWDSSSDHHVV

SEQ ID NO: 963 - protein, 11 aa, synthetic construct
  source 1..11: note = variable heavy chain, CDR3
AAWDDSLNGVV

SEQ ID NO: 964 - protein, 11 aa, synthetic construct
  source 1..11: note = variable heavy chain, CDR3
SSRDNTDNRVV

SEQ ID NO: 965 - protein, 11 aa, synthetic construct
  source 1..11: note = variable heavy chain, CDR3
QVWDSSSKHYV

SEQ ID NO: 966 - DNA, 354 bp, Homo sapiens
  source 1..354: mol_type = unassigned DNA
caggtgcagctggtgcagagcggagccgaggtgaagaagcctggagcttccgtcaaggtgtcctgcaaggccagcggctacaccttcgccagctactacatgcactggatgcggcaggcacctggacagggcctcgaatggatcggctggatcaaccccggcaacgtgaacaccaagtacaacgagaagttcaagggcagggccaccctgaccgtggacaccagcaccaacaccgcctacatggaactgagcagcctgcggagcgaggacaccgccgtgtactactgcgccagaagcacctactaccggcccctggactactggggccagggcaccctggtgaccgtgagcagc

SEQ ID NO: 967 - protein, 118 aa, Homo sapiens
QVQLVQSGAEVKKPGASVKVSCKASGYTFASYYMHWMRQAPGQGLEWIGWINPGNVNTKYNEKFKGRATLTVDTSTNTAYMELSSLRSEDTAVYYCARSTYYRPLDYWGQGTLVTVSS

SEQ ID NO: 968 - DNA, 336 bp, Homo sapiens
  source 1..336: mol_type = unassigned DNA
gacatcgtgatgacccagagccccgacagcctggccgtgagcctgggcgagcgggccaccatcaactgcaagagcagccagagcatcctgtacagcagcaaccagaagaactacctggcctggtatcagcagaagcccggccagagccccaagctgctgatctactgggccagcacccgggagagcggcgtgcccgaccggtttagcggcagcggctccggcaccgacttcaccctgaccatcagcagcctgcaggccgaggacgtggccgtgtactactgccaccagtacctgagcagctacaccttcggccagggcacaaagctggaaatcaag

SEQ ID NO: 969 - protein, 112 aa, Homo sapiens
DIVMTQSPDSLAVSLGERATINCKSSQSILYSSNQKNYLAWYQQKPGQSPKLLIYWASTRESGVPDRFSGSGSGTDFTLTISSLQAEDVAVYYCHQYLSSYTFGQGTKLEIK

SEQ ID NO: 970 - protein, 8 aa, Homo sapiens
GYTFASYY

SEQ ID NO: 971 - protein, 17 aa, Homo sapiens
WINPGNVNTKYNEKFKG

SEQ ID NO: 972 - protein, 9 aa, Homo sapiens
STYYRPLDY

SEQ ID NO: 973 - protein, 17 aa, Homo sapiens
KSSQSILYSSNQKNYLA

SEQ ID NO: 974 - protein, 7 aa, Homo sapiens
WASTRES

SEQ ID NO: 975 - protein, 8 aa, Homo sapiens
HQYLSSYT

SEQ ID NO: 976 - protein, 17 aa, Homo sapiens
  VARIANT 4..5: note = Any naturally occurring amino acid
  VARIANT 7: note = Any naturally occurring amino acid
  VARIANT 9: note = Any naturally occurring amino acid
WINXXNXNXKYNEKFKG

SEQ ID NO: 977 - protein, 9 aa, Homo sapiens
  VARIANT 2: note = Any naturally occurring amino acid
  VARIANT 4..5: note = Any naturally occurring amino acid
  VARIANT 9: note = Any naturally occurring amino acid
SXYXXPLDX

SEQ ID NO: 978 - protein, 17 aa, Homo sapiens
  VARIANT 6: note = Any naturally occurring amino acid
  VARIANT 10..13: note = Any naturally occurring amino acid
KSSQSXLYSXXXXNYLA

SEQ ID NO: 979 - protein, 7 aa, Homo sapiens
  VARIANT 4..5: note = Any naturally occurring amino acid
WASXXES

SEQ ID NO: 980 - protein, 8 aa, Homo sapiens
  VARIANT 5..6: note = Any naturally occurring amino acid
HQYLXXYT

SEQ ID NO: 981 - DNA, 369 bp, Homo sapiens
  source 1..369: mol_type = unassigned DNA
caggtgcagctggtgcagtctggggctgaggtgaagaagcctgggtcctcggtgaaggtctcctgcaaggcttctggaggcaccttcagtgacaatgctatcagctgggtgcgacaggccccaggacaagggcttgagtggatggggggcatcattcctatctttggaaaaccaaactacgcacagaagttccagggcagagtcacgattactgcggacgaatccacgagcacagcctacatggacctgaggagcctgagatctgaggacacggccgtttattactgtgcgagagattcagacgcgtattactatggttcggggggtatggacgtctggggccaaggcaccctggtcaccgtctcctca

SEQ ID NO: 982 - protein, 123 aa, Homo sapiens
QVQLVQSGAEVKKPGSSVKVSCKASGGTFSDNAISWVRQAPGQGLEWMGGIIPIFGKPNYAQKFQGRVTITADESTSTAYMDLRSLRSEDTAVYYCARDSDAYYYGSGGMDVWGQGTLVTVSS

SEQ ID NO: 983 - DNA, 335 bp, Homo sapiens
  source 1..335: mol_type = unassigned DNA
ctgcctgtgctgactcaatcatcctctgcctctgcttccctgggatcctcggtcaagctcacctgcactctgagcagtgggcatagtaactacatcatcgcatggcatcaacagcagccagggaaggcccctcggtacttgatgaaggttaatagtgatggcagccacaccaagggggacgggatccctgatcgcttctcaggctccagctctggggctgaccgctacctcaccatctccaacctccagtctgaggatgaggctagttatttctgtgagacctgggacactaagattcatgtcttcggaactgggaccaaggtctccgtcctcag

SEQ ID NO: 984 - protein, 111 aa, Homo sapiens
LPVLTQSSSASASLGSSVKLTCTLSSGHSNYIIAWHQQQPGKAPRYLMKVNSDGSHTKGDGIPDRFSGSSSGADRYLTISNLQSEDEASYFCETWDTKIHVFGTGTKVSVL

SEQ ID NO: 985 - DNA, 363 bp, Homo sapiens
  source 1..363: mol_type = unassigned DNA
caggtgcagctggtgcagtctggggctgaggtgaagaagcctgggtcctcggtgaaggtctcctgcaaggctcctggaggtatcttcaacaccaatgctttcagctgggtccgacaggcccctggacaaggtcttgagtgggtgggaggggtcatccctttgtttcgaacagcaagctacgcacagaacgtccagggcagagtcaccattaccgcggacgaatccacgaacacagcctacatggagcttaccagcctgagatctgcggacacggccgtgtattactgtgcgagaagtagtggttaccattttaggagtcactttgactcctggggcctgggaaccctggtcaccgtctcctca

SEQ ID NO: 986 - protein, 121 aa, Homo sapiens
QVQLVQSGAEVKKPGSSVKVSCKAPGGIFNTNAFSWVRQAPGQGLEWVGGVIPLFRTASYAQNVQGRVTITADESTNTAYMELTSLRSADTAVYYCARSSGYHFRSHFDSWGLGTLVTVSS

SEQ ID NO: 987 - DNA, 363 bp, Homo sapiens
  source 1..363: mol_type = unassigned DNA
caggtgcagctggtgcaatctggggctgaggtgaagaagcctgggtcctcggtgaaggtctcctgcaaggctcctggaggtatcttcaacaccaatgctttcagctgggtccgacaggcccctggacaaggtcttgagtgggtgggaggggtcatccctttgtttcgaacagcaagctacgcacagaacgtccagggcagagtcaccattaccgcggacgaatccacgaacacagcctacatggagcttaccagcctgagatctgcggacacggccgtgtattactgtgcgagaagtagtggttaccattttaggagtcactttgactcctggggcctgggaaccctggtcaccgtctcctca

SEQ ID NO: 988 - protein, 111 aa, Homo sapiens
NFMLTQPHSVSASPGKTVTISCTGSSGNIAANYVQWYQQRPGSAPTTVIYEDDRRPSGVPDRFSGSIDRSSNSASLTISGLKTEDEADYYCQTYDTNNHAVFGGGTHLTVL

SEQ ID NO: 989 - DNA, 333 bp, Homo sapiens
  source 1..333: mol_type = unassigned DNA
aattttatgctgactcagccccactctgtgtcggcgtctccggggaagacggtgaccatctcctgcaccggcagcagtggcaacattgccgccaactatgtgcagtggtaccaacaacgtccgggcagtgcccccactactgtgatctatgaggatgaccgaagaccctctggggtccctgatcggttctctggctccatcgacaggtcctccaactctgcctccctcaccatctcaggactgaagactgaggacgaggctgactactactgtcagacttatgataccaacaatcatgctgtgttcggaggaggcacccacctgaccgtcctc

SEQ ID NO: 990 - protein, 110 aa, Homo sapiens
SYELTQPPSASGKHGQRVTISCSGGTSNIGRNHVNWYQQLPGTAPKLLIYSNEQRPSGVPDRFSGSKSGTSASLAVSGLQSEDEADYYCASWDDNLSGWVFGGGTKLTVL

SEQ ID NO: 991 - DNA, 330 bp, Homo sapiens
  source 1..330: mol_type = unassigned DNA
tcctatgagctgactcagccaccctcagcgtctgggaaacacgggcagagggtcaccatctcttgttctggaggcacctccaacatcggacgtaatcatgttaactggtaccagcaactcccaggaacggcccccaaactcctcatctatagtaatgaacagcggccctcaggggtccctgaccgattctctggctccaaatctggcacctccgcctccctggccgtgagtgggctccagtctgaggatgaggctgattattactgtgcatcatgggatgacaacttgagtggttgggtgttcggcggagggaccaagctgaccgtccta

SEQ ID NO: 992 - protein, 120 aa, Homo sapiens
QVQLVQSGAEVKKPGSSVKVSCKASGGTFSAYAFTWVRQAPGQGLEWMGGITGMFGTANYAQKFQGRVTITADELTSTAYMELSSLTSEDTALYYCARGLYYYESSLDYWGQGTLVTVSS

SEQ ID NO: 993 - DNA, 361 bp, Homo sapiens
  source 1..361: mol_type = unassigned DNA
caggtgcagctggtgcagtctggggctgaggtgaagaagcctgggtcctcggtgaaggtctcctgcaaggcttctggaggcaccttcagcgcttatgctttcacctgggtgcggcaggcccctggacaagggcttgagtggatgggaggcatcaccggaatgtttggcacagcaaactacgcacagaagttccagggcagagtcacgattaccgcggacgaactcacgagcacagcctacatggagttgagctccctgacatctgaagacacggccctttattattgtgcgagaggattgtattactatgagagtagtcttgactattggggccagggaaccctggtcaccgtctcctcag

SEQ ID NO: 994 - protein, 110 aa, Homo sapiens
QSVLTQPPSASGSPGQSVTISCTGTSSDVGGYNSVSWYQQHPGKAPKLMIYEVTKRPSGVPDRFSASKSGNTASLTVSGLQAEDEADYFCCSYAGHSAYVFGTGTKVTVL

SEQ ID NO: 995 - DNA, 361 bp, Homo sapiens
  source 1..361: mol_type = unassigned DNA
caggtgcagctggtgcagtctggggctgaggtgaagaagcctgggtcctcggtgaaggtctcctgcagggcttctggaggcaccttcagcgcttatgctttcacctgggtgcggcaggcccctggacaagggcttgagtggatgggaggcatcaccggaatgtttggcacagcaaactacgcacagaagttccagggcagagtcacgattaccgcggacgaactcacgagcacagcctacatggagttgagctccctgacatctgaagacacggccctttattattgtgcgagaggattgtattactatgagagtagtcttgactattggggccagggaaccctggtcaccgtctcctcag

SEQ ID NO: 996 - protein, 108 aa, Homo sapiens
EIVLTQSPGTLSLSPGERATLSCRASQSLSSKYLAWYQQKPGQAPRLLIYGASSRATGIPDRFSGSGSGTDFTLTISRLEPEDFAVYSCQQYDGVPRTFGQGTTVEIK

SEQ ID NO: 997 - DNA, 330 bp, Homo sapiens
  source 1..330: mol_type = unassigned DNA
cagtctgtgctgactcagccaccctccgcgtccgggtctcctggacagtcagtcaccatctcctgcactggaaccagcagtgacgttggtggttataactctgtctcctggtaccaacagcacccaggcaaagcccccaaactcatgatttatgaggtcactaagcggccctcaggggtccctgatcgcttctctgcctccaagtctggcaacacggcctccctgaccgtctctgggctccaggctgaggatgaggctgattatttctgctgctcatatgcaggccacagtgcttatgtcttcggaactgggaccaaggtcaccgtcctg

SEQ ID NO: 998 - protein, 124 aa, Homo sapiens
QVQLVQSGAEVKKPGSSVKVSCTSSEVTFSSFAISWVRQAPGQGLEWLGGISPMFGTPNYAQKFQGRVTITADQSTRTAYMDLRSLRSEDTAVYYCARSPSYICSGGTCVFDHWGQGTLVTVSS

SEQ ID NO: 999 - DNA, 324 bp, Homo sapiens
  source 1..324: mol_type = unassigned DNA
gaaattgtgctgactcagtctccaggcaccctgtctttgtctccaggggaaagagccaccctctcctgcagggccagtcagagtcttagcagcaagtacttagcctggtatcagcagaaacctggccaggctcccaggctcctcatctatggtgcatccagcagggccactggcatcccagacaggttcagtggcagtgggtctgggacagacttcaccctcaccatcagtagactggagcctgaagattttgcagtgtattcctgtcagcagtatgatggcgtacctcggacgttcggccaagggaccacggtggaaatcaaa

SEQ ID NO: 1000 - protein, 110 aa, Homo sapiens
QPGLTQPPSVSKGLRQTATLTCTGNSNNVGNQGAAWLQQHQGHPPKLLSYRNNDRPSGISERFSASRSGNTASLTITGLQPEDEADYYCSTWDSSLSAVVFGGGTKLTVL

SEQ ID NO: 1001 - DNA, 372 bp, Homo sapiens
  source 1..372: mol_type = unassigned DNA
caggtgcagctggtgcagtcaggggctgaggtgaagaagcctgggtcctcggtgaaggtctcctgcacgtcctctgaagtcaccttcagtagttttgctatcagctgggtgcgacaggcccctggacaagggcttgagtggctgggagggatcagccctatgtttggaacacctaattacgcgcagaagttccaaggcagagtcaccattaccgcggaccagtccacgaggacagcctacatggacctgaggagcctgagatctgaggacacggccgtgtattattgtgcgagatctccttcttacatttgttctggtggaacctgcgtctttgaccattggggccagggaaccctggtcaccgtctcctca

SEQ ID NO: 1002 - protein, 107 aa, Homo sapiens
DIQMTQSPSSLSASVGDRVTITCRASQSISSYLNWYQQKPGKAPKLLIYAASSLQRGVPSRFSGSGSGTDFTLTISSLQPEDFAVYYCQQYDSSPYTFGQGTKVEIK

SEQ ID NO: 1003 - DNA, 372 bp, Homo sapiens
  source 1..372: mol_type = unassigned DNA
caggtacagctgcagcagtcaggggctgaggtgaagaagcctgggtcctcggtgaaggtctcctgcacgtcctctgaagtcaccttcagtagttttgctatcagctgggtgcgacaggcccctggacaagggcttgagtggctgggagggatcagccctatgtttggaacacctaattacgcgcagaagttccaaggcagagtcaccattaccgcggaccagtccacgaggacagcctacatggacctgaggagcctgagatctgaggacacggccgtgtattattgtgcgagatctccttcttacatttgttctggtggaacctgcgtctttgaccattggggccagggaaccctggtcaccgtctcctca

SEQ ID NO: 1004 - protein, 122 aa, Homo sapiens
QVQLVQSGAEVKKPGASVKVSCKTSGVTFSSYAISWVRQAPGQGLEWMGGIIGVFGVPKYAQNFQGRVTITADKPTSTVYMELNSLRAEDTAVYYCAREPGYYVGKNGFDVWGQGTMVTVSS

SEQ ID NO: 1005 - DNA, 330 bp, Homo sapiens
  source 1..330: mol_type = unassigned DNA
cagcctgggctgactcagccaccctcggtgtccaagggcttgagacagaccgccacactcacctgcactgggaacagcaacaatgttggcaaccaaggagcagcttggctgcagcagcaccagggccaccctcccaaactcctatcctacaggaataatgaccggccctcagggatctcagagagattctctgcatccaggtcaggaaacacagcctccctgaccattactggactccagcctgaggacgaggctgactattactgctcaacatgggacagcagcctcagtgctgtggtattcggcggagggaccaagctgaccgtccta

SEQ ID NO: 1006 - protein, 110 aa, Homo sapiens
SYELTQPPSVSKGLRQTAILTCTGDSNNVGHQGTAWLQQHQGHPPKLLSYRNGNRPSGISERFSASRSGNTASLTIIGLQPEDEADYYCSVWDSSLSAWVFGGGTKLTVL

SEQ ID NO: 1007 - DNA, 321 bp, Homo sapiens
  source 1..321: mol_type = unassigned DNA
gacatccagatgacccagtctccatcctccctgtctgcatctgtaggagacagagtcaccatcacttgccgggcaagtcagagcattagcagctatttaaattggtatcagcagaaaccagggaaagcccctaagctcctgatctatgctgcatccagtttgcaaagaggggtcccatcaaggttcagtggcagtggatctgggacagacttcactctcaccattagcagcctgcagcctgaagattttgcagtgtattactgtcagcagtatgatagttcaccgtacacttttggccaggggaccaaggtagagatcaaa

SEQ ID NO: 1008 - protein, 126 aa, Homo sapiens
QVQLVQSGAEVRKPGASVKVSCKASGYTFTGYYIHWVRQAPGQGLEWMGWINPMTGGTNYAQKFQVWVTMTRDTSINTAYMEVSRLTSDDTAVYYCARGASVLRYFDWQPEALDIWGLGTTVTVSS

SEQ ID NO: 1009 - DNA, 366 bp, Homo sapiens
  source 1..366: mol_type = unassigned DNA
caggtgcagctggtgcaatctggggctgaagtgaagaagcctggggcctcagtgaaggtctcctgcaagacttctggagtcaccttcagcagctatgctatcagttgggtgcgacaggcccctggacaagggcttgagtggatgggagggatcatcggtgtctttggtgtaccaaagtacgcgcagaacttccagggcagagtcacaattaccgcggacaaaccgacgagtacagtctacatggagctgaacagcctgagagctgaggacacggccgtgtattactgtgcgagagagcccgggtactacgtaggaaagaatggttttgatgtctggggccaagggacaatggtcaccgtctcttca

SEQ ID NO: 1010 - protein, 108 aa, Homo sapiens
QPVLTQPPSVSVAPGQTASIPCGGNNIGGYSVHWYQQKPGQAPLLVIYDDKDRPSGIPERFSGANSGSTATLTISRVEAGDEGDYYCQVWDSGNDRPLFGGGTKLTVL

SEQ ID NO: 1011 - DNA, 330 bp, Homo sapiens
  source 1..330: mol_type = unassigned DNA
tcctatgagctgactcagccaccctcggtgtccaagggcttgagacagaccgccatactcacctgcactggagacagcaacaatgttggccaccaaggtacagcttggctgcaacaacaccagggccaccctcccaaactcctatcctacaggaatggcaaccggccctcagggatctcagagagattctctgcatccaggtcaggaaatacagcctccctgaccattattggactccagcctgaggacgaggctgactactactgctcagtatgggacagcagcctcagtgcctgggtgttcggcggagggaccaagctgaccgtccta

SEQ ID NO: 1012 - protein, 123 aa, Homo sapiens
QVQLVQSGAEVKKPGSSVKVSCKASGGPFSMTAFTWLRQAPGQGLEWMGGISPIFRTPKYAQKFQGRVTITADESTNTANMELTSLKSEDTAVYYCARTLSSYQPNNDAFAIWGQGTMVTVSS

SEQ ID NO: 1013 - DNA, 378 bp, Homo sapiens
  source 1..378: mol_type = unassigned DNA
caggtgcagctggtgcagtctggggctgaggtgaggaagcctggggcctcagtgaaggtctcatgtaaggcttctggatacaccttcaccggttattatattcactgggtgcgacaggcccctggacaaggacttgagtggatgggttggatcaaccctatgactggtggcacaaactatgcacagaagtttcaggtctgggtcaccatgacccgggacacgtccatcaacacagcctacatggaggtgagcaggctgacatctgacgacacggccgtgtattactgtgcgaggggggcttccgtattacgatattttgactggcagcccgaggctcttgatatctggggcctcgggaccacggtcaccgtctcctca

SEQ ID NO: 1014 - protein, 106 aa, Homo sapiens
EIVLTQSPATLSLSPGERATLSCRASQSVSSYLAWYQQKPGQAPRLLIYDASNRATGIPARFSGSGSGTDFTLTISRLEPEDFAVYFCQQYGSSPQFGQGTRLEIK

SEQ ID NO: 1015 - DNA, 324 bp, Homo sapiens
  source 1..324: mol_type = unassigned DNA
cagcctgtgctgactcagccaccctcggtgtcagtggccccaggacagacggccagcattccctgtggggggaacaacattggaggctacagtgtacactggtaccaacaaaagccgggccaggcccccctcttggtcatttatgacgataaagaccggccctcagggatccctgagcgattctctggcgccaactctgggagcacggccaccctgacaatcagcagggtcgaagccggggatgagggcgactactactgtcaggtgtgggatagtggtaatgatcgtccgctgttcggcggagggaccaagctgaccgtccta

SEQ ID NO: 1016 - protein, 123 aa, Homo sapiens; identical to SEQ ID NO: 1012

SEQ ID NO: 1017 - DNA, 369 bp, Homo sapiens
  source 1..369: mol_type = unassigned DNA
caggtgcagctggtgcagtctggggctgaagtgaagaagcctggctcctcggtgaaggtttcctgcaaggcttctggaggccccttcagcatgactgctttcacctggctgcgacaggcccctggacaagggcttgagtggatgggtgggatcagccctatctttcgtacaccgaagtacgcacagaagttccagggcagagtcacgattaccgcggacgaatccacgaacacagccaacatggagctgaccagcctgaaatctgaggacacggccgtgtattactgtgcgagaaccctttcctcctaccaaccgaataatgatgcttttgctatctggggccaagggacaatggtcaccgtctcttca

SEQ ID NO: 1018 - protein, 110 aa, Homo sapiens
LPVLTQPPSASGTPGQRVTISCSGSSSNIGSNTVNWYQQLPGTAPKLLIYSNNQRPSGVPDRFSGSRSGTSASLAIIGLRPEDEADYYCQSYDSRLSASLFGTGTTVTVL

SEQ ID NO: 1019 - DNA, 318 bp, Homo sapiens
  source 1..318: mol_type = unassigned DNA
gaaattgtgttgacgcagtctccagccaccctgtctttgtctccaggggaaagagccaccctctcctgcagggccagtcagagtgttagcagctacttagcctggtaccaacagaaacctggccaggctcccaggctcctcatctatgatgcatccaacagggccactggcatcccagccaggttcagtggcagtgggtctgggacagacttcactctcaccatcagcagactggagcctgaagattttgcagtctatttctgtcagcagtatggtagctcacctcaattcggccaagggacacgactggagattaaa

SEQ ID NO: 1020 - DNA, 369 bp, Homo sapiens; identical to SEQ ID NO: 1017
  source 1..369: mol_type = unassigned DNA

SEQ ID NO: 1021 - skipped

SEQ ID NO: 1022 - DNA, 330 bp, Homo sapiens
  source 1..330: mol_type = unassigned DNA
ctgcctgtgctgactcagccaccctcagcgtctgggacccccgggcagagggtcaccatctcttgttctggaagcagctccaacatcggaagtaatactgtaaactggtaccagcagctcccaggaacggcccccaaactcctcatctatagtaataatcagcggccctcaggggtccctgaccgattctctggctccaggtcaggcacctcagcctccctggccatcattggactccggcctgaggatgaagctgattattactgtcagtcgtatgacagcaggctcagtgcttctctcttcggaactgggaccacggtcaccgtcctc

SEQ ID NO: 1023 - protein, 5 aa, synthetic construct
  source 1..5: note = consensus sequence
SYAFS

SEQ ID NO: 1024 - protein, 5 aa, Homo sapiens
TNAFS

SEQ ID NO: 1025 - protein, 5 aa, Homo sapiens
AYAFT

SEQ ID NO: 1026 - protein, 5 aa, Homo sapiens
SFAIS

SEQ ID NO: 1027 - protein, 5 aa, Homo sapiens
SYAIS

SEQ ID NO: 1028 - protein, 5 aa, Homo sapiens
GYYIH

SEQ ID NO: 1029 - protein, 5 aa, Homo sapiens
MTAFT

SEQ ID NO: 1030 - protein, 5 aa, Homo sapiens
DNAIS

SEQ ID NO: 1031 - protein, 17 aa, synthetic construct
  source 1..17: note = consensus sequence
GIIPMFGTPNYAQKFQG

SEQ ID NO: 1032 - protein, 17 aa, Homo sapiens
GVIPLFRTASYAQNVQG

SEQ ID NO: 1033 - protein, 17 aa, Homo sapiens
GIIGMFGTANYAQKFQG

SEQ ID NO: 1034 - protein, 17 aa, Homo sapiens
GISPMFGTPNYAQKFQG

SEQ ID NO: 1035 - protein, 17 aa, Homo sapiens
GIIGVFGVPKYAQKFQG

SEQ ID NO: 1036 - protein, 17 aa, Homo sapiens
WINPMTGGTNYAQKFQV

SEQ ID NO: 1037 - protein, 17 aa, Homo sapiens
GISPIFRTPKYAQKFQG

SEQ ID NO: 1038 - protein, 17 aa, Homo sapiens
GIIPIFGKPNYAQKFQG

SEQ ID NO: 1039 - protein, 12 aa, synthetic construct
  source 1..12: note = consensus sequence
SSGYYYGGGFDV

SEQ ID NO: 1040 - protein, 13 aa, Homo sapiens
SSGYHFGRSHFDS

SEQ ID NO: 1041 - protein, 11 aa, Homo sapiens
GLYYYESSLDY

SEQ ID NO: 1042 - protein, 15 aa, Homo sapiens
SPSYICSGGTCVFDH

SEQ ID NO: 1043 - protein, 13 aa, Homo sapiens
EPGYYVGKNGFDV

SEQ ID NO: 1044 - protein, 17 aa, Homo sapiens
GASVLRYFDWQPEALDI

SEQ ID NO: 1045 - protein, 14 aa, Homo sapiens
TLSSYQPNNDAFAI

SEQ ID NO: 1046 - protein, 14 aa, Homo sapiens
DSDAYYYGSGGMDV

SEQ ID NO: 1047 - protein, 12 aa, Homo sapiens
TGSSSNIGNYVA

SEQ ID NO: 1048 - protein, 13 aa, Homo sapiens
TGSSSNIAANYVQ

SEQ ID NO: 1049 - protein, 14 aa, synthetic construct
  source 1..14: note = consensus sequence
TGTSSDVGGYNSVS

SEQ ID NO: 1050 - protein, 13 aa, Homo sapiens
TGNSNNVGNQGAA

SEQ ID NO: 1051 - protein, 13 aa, Homo sapiens
TGDSNNVGHQGTA

SEQ ID NO: 1052 - protein, 11 aa, Homo sapiens
GGNNIGGYSVH

SEQ ID NO: 1053 - protein, 11 aa, Homo sapiens
RASQSVSSYLA

SEQ ID NO: 1054 - protein, 12 aa, Homo sapiens
RASQSLSSKYLA

SEQ ID NO: 1055 - protein, 12 aa, Homo sapiens
TGSSSNIGNYVA

SEQ ID NO: 1056 - protein, 13 aa, Homo sapiens
SGSSSNIGSNTVN

SEQ ID NO: 1057 - protein, 11 aa, Homo sapiens
RASQSISSYLN

SEQ ID NO: 1058 - protein, 12 aa, Homo sapiens
TLSSGHSNYIIA

SEQ ID NO: 1059 - protein, 7 aa, synthetic construct
  source 1..7: note = consensus sequence
SNSDRPS

SEQ ID NO: 1060 - protein, 7 aa, Homo sapiens
EDDRRPS

SEQ ID NO: 1061 - protein, 7 aa, Homo sapiens
EVTKRPS

SEQ ID NO: 1062 - protein, 7 aa, Homo sapiens
RNNDRPS

SEQ ID NO: 1063 - protein, 7 aa, Homo sapiens
RNGNRPS

SEQ ID NO: 1064 - protein, 7 aa, Homo sapiens
DDKDRPS

SEQ ID NO: 1065 - protein, 7 aa, Homo sapiens
DASNRAT

SEQ ID NO: 1066 - protein, 7 aa, Homo sapiens
GASSRAT

SEQ ID NO: 1067 - protein, 7 aa, Homo sapiens
SNNQRPS

SEQ ID NO: 1068 - protein, 7 aa, Homo sapiens
AASSLQR

SEQ ID NO: 1069 - protein, 7 aa, Homo sapiens
SNEQRPS

SEQ ID NO: 1070 - protein, 11 aa, Homo sapiens
VNSDGSHTKGD

SEQ ID NO: 1071 - protein, 10 aa, synthetic construct
  source 1..10: note = consensus sequence
QSYDSLSAYV

SEQ ID NO: 1072 - protein, 10 aa, Homo sapiens
QSYDTNNHAV

SEQ ID NO: 1073 - protein, 10 aa, Homo sapiens
CSYAGHSAYV

SEQ ID NO: 1074 - protein, 11 aa, Homo sapiens
STWDSSLSAVV

SEQ ID NO: 1075 - protein, 11 aa, Homo sapiens
SVWDSSLSAWV

SEQ ID NO: 1076 - protein, 11 aa, Homo sapiens
QVWDSGNDRPL

SEQ ID NO: 1077 - protein, 9 aa, Homo sapiens
QQYGSSPQV

SEQ ID NO: 1078 - protein, 9 aa, Homo sapiens
QQYDGVPRT

SEQ ID NO: 1079 - protein, 11 aa, Homo sapiens
QSYDSRLSASL

SEQ ID NO: 1080 - protein, 9 aa, Homo sapiens
QQYDSSPYT

SEQ ID NO: 1081 - protein, 11 aa, Homo sapiens
ASWDDNLSGWV

SEQ ID NO: 1082 - protein, 9 aa, Homo sapiens
ETWDTKIHV

SEQ ID NO: 1083 - protein, 10 aa, synthetic construct
  source 1..10: note = consensus sequence
GTETSQVAPA

SEQ ID NO: 1084 - protein, 6 aa, synthetic construct
  source 1..6: note = consensus sequence
HHHHHH

SEQ ID NO: 1085 - protein, 4 aa, Influenza A virus
INGW

SEQ ID NO: 1086 - protein, 4 aa, Influenza A virus
IDGW

SEQ ID NO: 1087 - protein, 4 aa, Influenza A virus
VAGW

SEQ ID NO: 1088 - protein, 4 aa, Influenza A virus
VDGW

SEQ ID NO: 1089 - protein, 4 aa, Influenza A virus
IAGW

SEQ ID NO: 1090 - protein, 87 aa, Homo sapiens
KKPGSSVKVSCKASGGTFSSYAISWVRQAPGQGLEWMGGIIPMFGTPNYAQKFQGRVTITADESTSTAYMELSSLRSEDTAVYYCAR

SEQ ID NO: 1091 - protein, 87 aa, Homo sapiens
KKPGSSVKVSCKASGGTFSSYAISWVRQAPGQGLEWMGGIIPIFGTPNYAQKFQGRVTITADESTSTAYMELSSLRSEDTAVYYCAR

SEQ ID NO: 1092 - protein, 108 aa, Homo sapiens
KKPGSSVKVSCTSSEVTFSSFAISWVRQAPGQGLEWLGGISPMFGTPNYAQKFQGRVTITADQSTRTAYMDLRSLRSEDTAVYYCARSPSYICSGGTCVFDHWGQGTL

SEQ ID NO: 1093 - protein, 104 aa, Homo sapiens
KKPGSSVKVSCKASGGTFSAYAFTWVRQAPGQGLEWMGGIIGMFGTANYAQKFQGRVTITADELTSTAYMELSSLTSEDTALYYCARGLYYYESSFDYWGQGTL

SEQ ID NO: 1094 - protein, 107 aa, Homo sapiens
KKPGSSVKVSCKASGGPFSMTAFTWLRQAPGQGLEWMGGISPIFRTPKYAQKFQGRVTITADESTNTANMELTSLKSEDTAVYYCARTLSSYQPNNDAFAIWGQGTM

SEQ ID NO: 1095 - protein, 106 aa, Homo sapiens
KKPGASVKVSCKTSGVTFSSYAISWVRQAPGQGLEWMGGIIGVFGVPKYAQKFQGRVTITADKPTSTVYMELNSLRAEDTAVYYCAREPGYYVGKNGFDVWGQGTM

SEQ ID NO: 1096 - protein, 105 aa, Homo sapiens
KKPGSSVKVSCKAPGGIFNTNAFSWVRQAPGQGLEWVGGVIPLFRTASYAQNVQGRVTITADESTNTAYMELTSLRSADTAVYYCARSSGYHFRSHFDSWGLGTL

SEQ ID NO: 1097 - protein, 110 aa, Homo sapiens
RKPGASVKVSCKASGYTFTGYYIHWVRQAPGQGLEWMGWINPMTGGTNYAQKFQVWVTMTRDTSINTAYMEVTRLTSDDTAVYYCARGASVLRYFDWQPEALDIWGLGTT

SEQ ID NO: 1098 - protein, 8 aa, Homo sapiens
GGTFSSYA

SEQ ID NO: 1099 - protein, 8 aa, Homo sapiens
GGTFSSYA

SEQ ID NO: 1100 - protein, 8 aa, Homo sapiens
EVTFSSFA

SEQ ID NO: 1101 - protein, 8 aa, Homo sapiens
GGTFSAYA

SEQ ID NO: 1102 - protein, 8 aa, Homo sapiens
GGPFSMTA

SEQ ID NO: 1103 - protein, 8 aa, Homo sapiens
GVTFSSYA

SEQ ID NO: 1104 - protein, 8 aa, Homo sapiens
GGIFNTNA

SEQ ID NO: 1105 - protein, 8 aa, Homo sapiens
GYTFTGYY

SEQ ID NO: 1106 - protein, 8 aa, Homo sapiens
IIPMFGTP

SEQ ID NO: 1107 - protein, 8 aa, Homo sapiens
IIPIFGTP

SEQ ID NO: 1108 - protein, 8 aa, Homo sapiens
ISPMFGTP

SEQ ID NO: 1109 - protein, 8 aa, Homo sapiens
IIGMFGTA

SEQ ID NO: 1110 - protein, 8 aa, Homo sapiens
ISPIFRTP

SEQ ID NO: 1111 - protein, 8 aa, Homo sapiens
IIGVFGVP

SEQ ID NO: 1112 - protein, 8 aa, Homo sapiens
VIPLFRTA

SEQ ID NO: 1113 - protein, 8 aa, Homo sapiens
INPMTGGT

SEQ ID NO: 1114 - protein, 17 aa, Homo sapiens
ARSPSYICSGGTCVFDH

SEQ ID NO: 1115 - protein, 13 aa, Homo sapiens
ARGLYYYESSFDY

SEQ ID NO: 1116 - protein, 16 aa, Homo sapiens
ARTLSSYQPNNDAFAI

SEQ ID NO: 1117 - protein, 15 aa, Homo sapiens
AREPGYYVGKNGFDV

SEQ ID NO: 1118 - protein, 14 aa, Homo sapiens
ARSSGYHFRSHFDS

SEQ ID NO: 1119 - protein, 19 aa, Homo sapiens
ARGASVLRYFDWQPEALDI

SEQ ID NO: 1120 - protein, 8 aa, Homo sapiens
SGNIAANY

SEQ ID NO: 1121 - protein, 9 aa, Homo sapiens
SSDVGGYNS

SEQ ID NO: 1122 - protein, 8 aa, Homo sapiens
SNNVGNQG

SEQ ID NO: 1123 - protein, 8 aa, Homo sapiens
SNNVGHQG

SEQ ID NO: 1124 - protein, 6 aa, Homo sapiens
NIGGYS

SEQ ID NO: 1125 - protein, 7 aa, Homo sapiens
QSSVSSY

SEQ ID NO: 1126 - protein, 7 aa, Homo sapiens
QSLSSKY

SEQ ID NO: 1127 - protein, 8 aa, Homo sapiens
SSNIGSNT

SEQ ID NO: 1128 - protein, 6 aa, Homo sapiens
QSISSY

SEQ ID NO: 1129 - protein, 8 aa, Homo sapiens
TSNIGRNH

SEQ ID NO: 1130-1139 - skipped (10 entries)

SEQ ID NO: 1140 - protein, 10 aa, Homo sapiens
QTYDTNNHAV

SEQ ID NO: 1141 - protein, 10 aa, Homo sapiens
CSYAGHSAYV

SEQ ID NO: 1142 - protein, 11 aa, Homo sapiens
STWDSSLSAVV

SEQ ID NO: 1143 - protein, 11 aa, Homo sapiens
SVWDSSLSAWV

SEQ ID NO: 1144 - protein, 11 aa, Homo sapiens
QVWDSGNDRPL

SEQ ID NO: 1145 - protein, 8 aa, Homo sapiens
QQYGSSPQ

SEQ ID NO: 1146 - protein, 9 aa, Homo sapiens
QQYDGVPRT

SEQ ID NO: 1147 - protein, 11 aa, Homo sapiens
QSYDSRLSASL

SEQ ID NO: 1148 - protein, 9 aa, Homo sapiens
QQYDSSPYT

SEQ ID NO: 1149 - protein, 11 aa, Homo sapiens
ASWDDNLSGWV

SEQ ID NO: 1150 - skipped

SEQ ID NO: 1151 - protein, 10 aa, Homo sapiens
QVQLVQGAEV

SEQ ID NO: 1152 - protein, 5 aa, Homo sapiens
VTVSS

SEQ ID NO: 1153 - DNA, 354 bp, Homo sapiens
  source 1..354: mol_type = unassigned DNA
caggtccagctcgtccagtccggcgctgaagtggtgaaacccggggcatccgtcaaagtctcttgtaaggctagtggctacaccttcacatcctactggatgcattgggtgaaacaggcacctggccagggactcgaatggatcggagccgtgtctcctggaaattccgacacctcctacaacgaaaaattcaagggcaaggcaaccctcactgtggatactagtgcttctaccgcctacatggaactctcatctctccgctctgaggacactgccgtctactactgtactcggtcacgatacgggaacaacgctctcgattactggggacagggcacactggtcactgtctct

SEQ ID NO: 1154 - protein, 118 aa, Homo sapiens
QVQLVQSGAEVVKPGASVKVSCKASGYTFTSYWMHWVKQAPGQGLEWIGAVSPGNSDTSYNEKFKGKATLTVDTSASTAYMELSSLRSEDTAVYYCTRSRYGNNALDYWGQGTLVTVS

SEQ ID NO: 1155 - DNA, 321 bp, Homo sapiens
  source 1..321: mol_type = unassigned DNA
gatattcagctcacacagagcccatcttctctgtctgcttctgtgggcgatcgagtgacaatcacttgtcgggctagtcagggcatttctagcaacattgtgtggctccagcagaaacctggcaaagccccaaaaggcctcatctaccacggaaccaacctggaatctggcgtgccatctcggtttagtggatctggatccgggaccgattacacactcaccatctcttcactggaacctgaggatttcgccacctactactgtgtccagtactcccagtttccacccacttttggacagggaaccaaactcgagatcaaa

SEQ ID NO: 1156 - protein, 107 aa, Homo sapiens
DIQLTQSPSSLSASVGDRVTITCRASQGISSNIVWLQQKPGKAPKGLIYHGTNLESGVPSRFSGSGSGTDYTLTISSLEPEDFATYYCVQYSQFPPTFGQGTKLEIK

SEQ ID NO: 1157 - protein, 8 aa, Homo sapiens
GYTFTSYW

SEQ ID NO: 1158 - protein, 8 aa, Homo sapiens
VSPGNSDT

SEQ ID NO: 1159 - protein, 12 aa, Homo sapiens
TRSRYGNNALDY

SEQ ID NO: 1160 - protein, 9 aa, Homo sapiens
QGISSNIVW

SEQ ID NO: 1161 - skipped

SEQ ID NO: 1162 - protein, 9 aa, Homo sapiens
VQYSQFPPT

SEQ ID NO: 1163 - DNA, 354 bp, Homo sapiens
  source 1..354: mol_type = unassigned DNA
caggtccagctcgtccagtccggcgctgaagtggtgaaacccggggcatccgtcaaagtctcttgtaaggctagtggctacaccttcacatcctactggatgcattgggtgaaacaggcacctggccagggactcgaatggatcggagccgtgtctcctggaaattccgacacctcctacaacgaaaaattcaagggcaaggcaaccctcactgtggacaaatctgcctctaccgcctacatggaactctcatctctccgctctgaggatactgctgtgtactactgtacccggtcacgatacggcaataacgccctcgattactgggggcagggaactctggtcactgtgtct

SEQ ID NO: 1164 - protein, 118 aa, Homo sapiens
QVQLVQSGAEVVKPGASVKVSCKASGYTFTSYWMHWVKQAPGQGLEWIGAVSPGNSDTSYNEKFKGKATLTVDKSASTAYMELSSLRSEDTAVYYCTRSRYGNNALDYWGQGTLVTVS

SEQ ID NO: 1165 - DNA, 357 bp, Mus musculus
  source 1..357: mol_type = unassigned DNA
caggtccagctgcagcagtctgggactgtgctcgcaaggcctggggcttcagtgaagatgtcctgcaaggcttctggctacacctttaccagttactggatgcactgggtaaaacagaggcctggacagggtctggaatggattggcgctgtttctcctggaaatagtgatactagctacaaccagaagttcaagggcaaggccacactgactgcagtcacatccaccagcactgcctacatggagttcagcagcctgacaaatgaggactctgcggtctattactgtacaagaagtcgatatggtaacaatgctttggactactggggccaagggaccacggtcaccgtctcctca

SEQ ID NO: 1166 - protein, 119 aa, Mus musculus
QVQLQQSGTVLARPGASVKMSCKASGYTFTSYWMHWVKQRPGQGLEWIGAVSPGNSDTSYNQKFKGKATLTAVTSTSTAYMEFSSLTNEDSAVYYCTRSRYGNNALDYWGQGTTVTVSS

SEQ ID NO: 1167 - DNA, 330 bp, Mus musculus
  source 1..330: mol_type = unassigned DNA
gacatcgagctcacccagtctcctgcttccttagctgtatctctggggcagagggccaccatctcatacagggccagcaaaagtgtcagtacatctggctatagttatatgcactggaaccaacagaaaccaggacagccacccagactcctcatctatcttgtatccaacctagaatctggggtccctgccaggttcagtggcagtgggtctgggacagacttcaccctcaacatccatcctgtggaggaggaggatgctgcaacctattactgtcagcacattaagggagcttacacgttcggaggggggaccaagctggaaataaaa

SEQ ID NO: 1168 - DNA, 330 bp, Mus musculus
  source 1..330: mol_type = unassigned DNA
gacatcgagctcactcagtctccagcttctttggctgtgtctctagggcagagggccaccatctcctgcagagccagcgcaagtgttgataattatggcattagttttatgaactggttccaacagaaaccaggacagccacccaaactcctcatctatgctgcatccaaccaaggatccggggtccctgccaggtttagtggcagtgggtctgggacagacttcagcctcaacatccatcctatggaggaggatgatactgcaacctattactgtcagcacattaagggagcttacacgttcggaggggggaccaagctggagctgaaa

SEQ ID NO: 1169 - DNA, 321 bp, Mus musculus
  source 1..321: mol_type = unassigned DNA
gacatcgagctcactcagtctccatcctccatgtctgtatctctgggagacacagtcaacatcacttgccgtgcaagtcagggcattagcagtaatatagtgtggttgcagcagaaaccagggaagtcatttaagggcctgatctatcatgggaccaatttggaagatggagttccatcaaggttcagtggcagtggatctggagccgattattctctcaccatcagcagcctggaatctgaggattttgcagactattactgtgtacagtattctcagtttcctcccacgttcggctcggggaccaagctggagctgaaa

SEQ ID NO: 1170 - protein, 107 aa, Mus musculus
DIELTQSPSSMSVSLGDTVNITCRASQGISSNIVWLQQKPGKSFKGLIYHGTNLEDGVPSRFSGSGSGADYSLTISSLESEDFADYYCVQYSQFPPTFGSGTKLELK

SEQ ID NO: 1171 - protein, 118 aa, Homo sapiens; identical to SEQ ID NO: 1164

SEQ ID NO: 1172 - protein, 118 aa, Mus musculus
QVQLQQSGTVLARPGASVKMSCKASGYTFTSYWMHWVKQRPGQGLEWIGAVSPGNSDTSYNQKFKGKATLTAVTSTSTAYMEFSSLTNEDSAVYYCTRSRYGNNALDYWGQGTTVTVS

SEQ ID NO: 1173 - protein, 107 aa, Homo sapiens
DIQMTQSPSSLSASVGDRVTITCRASQGISSNIVWYQQKPGKAPKGLIYHGTNLESGVPSRFSGSGSGTDYTLTISSLQPEDFATYYCVQYSQFPPTFGQGTKLEIK

SEQ ID NO: 1174 - protein, 98 aa, Homo sapiens
QVQLVQSGAEVKKPGSSVKVSCKASGGTFSSYAISWVRQAPGQGLEWMGGIIPIFGTANYAQKFQGRVTITADESTSTAYMELSSLRSEDTAVYYCAR

SEQ ID NO: 1175 - DNA, 294 bp, Homo sapiens
  source 1..294: mol_type = unassigned DNA
caggtgcagctggtgcagtctggggctgaggtgaagaagcctgggtcctcggtgaaggtctcctgcaaggcttctggaggcaccttcagcagctatgctatcagctgggtgcgacaggcccctggacaagggcttgagtggatgggagggatcatccctatctttggtacagcaaactacgcacagaagttccagggcagagtcacgattaccgcggacgaatccacgagcacagcctacatggagctgagcagcctgagatctgaggacacggccgtgtattactgtgcgaga

SEQ ID NO: 1176 - protein, 8 aa, synthetic construct
ISPMFGTP

SEQ ID NO: 1177 - protein, 8 aa, synthetic construct
IIPIFGTA

SEQ ID NO: 1178 - protein, 8 aa, synthetic construct
ISPIFGTA

SEQ ID NO: 1179 - protein, 8 aa, synthetic construct
  VARIANT 2: note = Ile or Ser
  VARIANT 4: note = Ile or Met
IXPXFGTA

SEQ ID NO: 1180 - protein, 8 aa, synthetic construct
  VARIANT 1: note = Gly or Glu
  VARIANT 2: note = Gly or Val
XXTFSSYA

SEQ ID NO: 1181 - protein, 8 aa, synthetic construct
  VARIANT 2: note = Ile or Ser
  VARIANT 4: note = Ile or Met
IXPXFGTA

SEQ ID NO: 1182 - DNA, 354 bp, synthetic construct
  source 1..354: mol_type = other DNA
caggtgcagctggtgcagagcggagccgaggtgaagaagcctggagcttccgtcaaggtgtcctgcaaggccagcggctacaccttcgccagccaatggatgcactggatgcggcaggcacctggacagggcctcgaatggatcggctggatcaaccccggcaacgtgaacaccaagtacaacgagaagttcaagggcagggccaccctgaccgtggacaccagcaccaacaccgcctacatggaactgagcagcctgcggagcgaggacaccgccgtgtactactgcgccagaagcacctggtaccggccgctggactactggggccagggcaccctggtgaccgtgagcagc

SEQ ID NO: 1183 - protein, 118 aa, synthetic construct
QVQLVQSGAEVKKPGASVKVSCKASGYTFASQWMHWMRQAPGQGLEWIGWINPGNVNTKYNEKFKGRATLTVDTSTNTAYMELSSLRSEDTAVYYCARSTWYRPLDYWGQGTLVTVSS

SEQ ID NO: 1184 - DNA, 336 bp, synthetic construct
  source 1..336: mol_type = other DNA; note = Variable light chain
gacatcgtgatgacccagagccccgacagcctggccgtgagcctgggcgagcgggccaccatcaactgcaagagcagccagagcatcctgtacagcagcaaccagaagaactacctggcctggtatcagcagaagcccggccagagccccaagctgctgatctactgggccagcacccgggagagcggcgtgcccgaccggtttagcggcagcggctccggcaccgacttcaccctgaccatcagcagcctgcaggccgaggacgtggccgtgtactactgccaccagtacatcagcagctacaccttcggccagggcacaaagctggaaatcaag

SEQ ID NO: 1185 - protein, 112 aa, synthetic construct
  source 1..112: note = Variable light chain
DIVMTQSPDSLAVSLGERATINCKSSQSILYSSNQKNYLAWYQQKPGQSPKLLIYWASTRESGVPDRFSGSGSGTDFTLTISSLQAEDVAVYYCHQYISSYTFGQGTKLEIK

SEQ ID NO: 1186 - DNA, 354 bp, synthetic construct
  source 1..354: mol_type = other DNA; note = Variable light chain
caggtgcagctggtgcagagcggagccgaggtgaagaagcctggagcttccgtcaaggtgtcctgcaaggccagcggctacaccttcgccagcagctggatgcactggatgcggcaggcacctggacagggcctcgaatggatcggctggatcaaccccggcaacgtgaacaccaagtacaacgagaagttcaagggcagggccaccctgaccgtggacaccagcaccaacaccgcctacatggaactgagcagcctgcggagcgaggacaccgccgtgtactactgcgccagaagcacgtggtatcggccgaatgactactggggccagggcaccctggtgaccgtgagcagc

SEQ ID NO: 1187 - protein, 118 aa, synthetic construct
  source 1..118: note = Variable light chain
QVQLVQSGAEVKKPGASVKVSCKASGYTFASSWMHWMRQAPGQGLEWIGWINPGNVNTKYNEKFKGRATLTVDTSTNTAYMELSSLRSEDTAVYYCARSTWYRPNDYWGQGTLVTVSS

SEQ ID NO: 1188 - DNA, 336 bp, synthetic construct
  source 1..336: mol_type = other DNA; note = Variable light chain
gacatcgtgatgacccagagccccgacagcctggccgtgagcctgggcgagcgggccaccatcaactgcaagagcagccagagcatcctgtacagcagcaaccagaagaactacctggcctggtatcagcagaagcccggccagagccccaagctgctgatctactgggccagcacccgggagagcggcgtgcccgaccggtttagcggcagcggctccggcaccgacttcaccctgaccatcagcagcctgcaggccgaggacgtggccgtgtactactgccaccagtacaaaagcagctacaccttcggccagggcacaaagctggaaatcaag

SEQ ID NO: 1189 - protein, 112 aa, synthetic construct
  source 1..112: note = Variable light chain
DIVMTQSPDSLAVSLGERATINCKSSQSILYSSNQKNYLAWYQQKPGQSPKLLIYWASTRESGVPDRFSGSGSGTDFTLTISSLQAEDVAVYYCHQYKSSYTFGQGTKLEIK

SEQ ID NO: 1190 - DNA, 354 bp, synthetic construct
  source 1..354: mol_type = other DNA; note = Variable light chain
caggtgcagctggtgcagagcggagccgaggtgaagaagcctggagcttccgtcaaggtgtcctgcaaggccagcggctacaccttcgccagcagctggatgcactggatgcggcaggcacctggacagggcctcgaatggatcggctggatcaaccccggcaacgtgaacaccaagtacaacgagaagttcaagggcagggccaccctgaccgtggacaccagcaccaacaccgcctacatggaactgagcagcctgcggagcgaggacaccgccgtgtactactgcgccagaaccacccgttatcggcccctggactactggggccagggcaccctggtgaccgtgagcagc

SEQ ID NO: 1191 - protein, 118 aa, synthetic construct
  source 1..118: note = Variable light chain
QVQLVQSGAEVKKPGASVKVSCKASGYTFASSWMHWMRQAPGQGLEWIGWINPGNVNTKYNEKFKGRATLTVDTSTNTAYMELSSLRSEDTAVYYCARTTRYRPLDYWGQGTLVTVSS

SEQ ID NO: 1192 - DNA, 336 bp, synthetic construct
  source 1..336: mol_type = other DNA; note = Variable light chain
gacatcgtgatgacccagagccccgacagcctggccgtgagcctgggcgagcgggccaccatcaactgcaagagcagccagagcatcctgtacagcagcaaccagaagaactacctggcctggtatcagcagaagcccggccagagccccaagctgctgatctactgggccagcacccgggagagcggcgtgcccgaccggtttagcggcagcggctccggcaccgacttcaccctgaccatcagcagcctgcaggccgaggacgtggccgtgtactactgccaccagtaccgtagcagctacaccttcggccagggcacaaagctggaaatcaag

SEQ ID NO: 1193 - protein, 112 aa, synthetic construct
  source 1..112: note = Variable light chain
DIVMTQSPDSLAVSLGERATINCKSSQSILYSSNQKNYLAWYQQKPGQSPKLLIYWASTRESGVPDRFSGSGSGTDFTLTISSLQAEDVAVYYCHQYRSSYTFGQGTKLEIK

SEQ ID NO: 1194 - DNA, 354 bp, synthetic construct
  source 1..354: mol_type = other DNA; note = Variable light chain
caggtgcagctggtgcagagcggagccgaggtgaagaagcctggagcttccgtcaaggtgtcctgcaaggccagcggctacaccttcgccagccaatatatgcactggatgcggcaggcacctggacagggcctcgaatggatcggctggatcaaccccggcaacgtgaacaccaagtacaacgagaagttcaagggcagggccaccctgaccgtggacaccagcaccaacaccgcctacatggaactgagcagcctgcggagcgaggacaccgccgtgtactactgcgccagactgacctattatcggccgccggactactggggccagggcaccctggtgaccgtgagcagc

SEQ ID NO: 1195 - protein, 118 aa, synthetic construct
  source 1..118: note = Variable light chain
QVQLVQSGAEVKKPGASVKVSCKASGYTFASQYMHWMRQAPGQGLEWIGWINPGNVNTKYNEKFKGRATLTVDTSTNTAYMELSSLRSEDTAVYYCARLTYYRPPDYWGQGTLVTVSS

SEQ ID NO: 1196 - DNA, 336 bp, synthetic construct
  source 1..336: mol_type = other DNA; note = Variable light chain
gacatcgtgatgacccagagccccgacagcctggccgtgagcctgggcgagcgggccaccatcaactgcaagagcagccagagcatcctgtacagcagcaaccagaagaactacctggcctggtatcagcagaagcccggccagagccccaagctgctgatctactgggccagcacccgggagagcggcgtgcccgaccggtttagcggcagcggctccggcaccgacttcaccctgaccatcagcagcctgcaggccgaggacgtggccgtgtactactgccaccagtactatagcagctacaccttcggccagggcacaaagctggaaatcaag

SEQ ID NO: 1197 - protein, 112 aa, synthetic construct
  source 1..112: note = Variable light chain
DIVMTQSPDSLAVSLGERATINCKSSQSILYSSNQKNYLAWYQQKPGQSPKLLIYWASTRESGVPDRFSGSGSGTDFTLTISSLQAEDVAVYYCHQYYSSYTFGQGTKLEIK

SEQ ID NO: 1198 - DNA, 354 bp, synthetic construct
  source 1..354: mol_type = other DNA; note = Variable light chain
caggtgcagctggtgcagagcggagccgaggtgaagaagcctggagcttccgtcaaggtgtcctgcaaggccagcggctacaccttcgccagcgcgtggatgcactggatgcggcaggcacctggacagggcctcgaatggatcggctggatcaaccccggcaacgtgaacaccaagtacaacgagaagttcaagggcagggccaccctgaccgtggacaccagcaccaacaccgcctacatggaactgagcagcctgcggagcgaggacaccgccgtgtactactgcgccagaagcacgtattaccggccgctggactactggggccagggcaccctggtgaccgtgagcagc

SEQ ID NO: 1199 - protein, 118 aa, synthetic construct
  source 1..118: note = Variable light chain
QVQLVQSGAEVKKPGASVKVSCKASGYTFASAWMHWMRQAPGQGLEWIGWINPGNVNTKYNEKFKGRATLTVDTSTNTAYMELSSLRSEDTAVYYCARSTYYRPLDYWGQGTLVTVSS

SEQ ID NO: 1200 - DNA, 336 bp, synthetic construct
  source 1..336: mol_type = other DNA; note = Variable light chain
gacatcgtgatgacccagagccccgacagcctggccgtgagcctgggcgagcgggccaccatcaactgcaagagcagccagagcatcctgtacagcagcaaccagaagaactacctggcctggtatcagcagaagcccggccagagccccaagctgctgatctactgggccagcacccgggagagcggcgtgcccgaccggtttagcggcagcggctccggcaccgacttcaccctgaccatcagcagcctgcaggccgaggacgtggccgtgtactactgccaccagtacatgagcagctacaccttcggccagggcacaaagctggaaatcaag

SEQ ID NO: 1201 - protein, 112 aa, synthetic construct
  source 1..112: note = Variable light chain
DIVMTQSPDSLAVSLGERATINCKSSQSILYSSNQKNYLAWYQQKPGQSPKLLIYWASTRESGVPDRFSGSGSGTDFTLTISSLQAEDVAVYYCHQYMSSYTFGQGTKLEIK

SEQ ID NO: 1202 - protein, 8 aa, synthetic construct
  source 1..8: note = variable heavy chain, CDR1
GYTFASYY

SEQ ID NO: 1203 - protein, 8 aa, synthetic construct
  source 1..8: note = variable heavy chain, CDR1
GYTFASQW

SEQ ID NO: 1204 - protein, 8 aa, synthetic construct
  source 1..8: note = variable heavy chain, CDR1
GYTFASSW

SEQ ID NO: 1205 - protein, 8 aa, synthetic construct
  source 1..8: note = variable heavy chain, CDR1
GYTFASQY

SEQ ID NO: 1206 - protein, 8 aa, synthetic construct
  source 1..8: note = variable heavy chain, CDR1
GYTFASAW

SEQ ID NO: 1207 - protein, 12 aa, synthetic construct
  source 1..12: note = variable heavy chain, CDR1
QSILYSSNQKNY

SEQ ID NO: 1208 - protein, 8 aa, synthetic construct
  source 1..8: note = variable heavy chain, CDR2
INPGNVNT

SEQ ID NO: 1209 - protein, 6 aa, synthetic construct
  source 1..6: note = variable heavy chain, CDR2
WASTRE

SEQ ID NO: 1210 - protein, 9 aa, synthetic construct
  source 1..9: note = variable heavy chain, CDR3
STYYRPLDY

SEQ ID NO: 1211 - protein, 9 aa, synthetic construct
  source 1..9: note = variable heavy chain, CDR3
STWYRPLDY

SEQ ID NO: 1212 - protein, 9 aa, synthetic construct
  source 1..9: note = variable heavy chain, CDR3
STWYRPNDY

SEQ ID NO: 1213 - protein, 9 aa, synthetic construct
  source 1..9: note = variable heavy chain, CDR3
TTRYRPLDY

SEQ ID NO: 1214 - protein, 9 aa, synthetic construct
  source 1..9: note = variable heavy chain, CDR3
LTYYRPPDY

SEQ ID NO: 1215 - protein, 8 aa, synthetic construct
  source 1..8: note = variable heavy chain, CDR3
HQYLSSYT

SEQ ID NO: 1216 - protein, 8 aa, synthetic construct
  source 1..8: note = variable heavy chain, CDR3
HQYISSYT

SEQ ID NO: 1217 - protein, 8 aa, synthetic construct
  source 1..8: note = variable heavy chain, CDR3
HQYKSSYT

SEQ ID NO: 1218 - protein, 8 aa, synthetic construct
  source 1..8: note = variable heavy chain, CDR3
HQYRSSYT

SEQ ID NO: 1219 - protein, 8 aa, synthetic construct
  source 1..8: note = variable heavy chain, CDR3
HQYYSSYT

SEQ ID NO: 1220 - protein, 8 aa, synthetic construct
  source 1..8: note = variable heavy chain, CDR3
HQYMSSYT

SEQ ID NO: 1221 - DNA, 27 bp, synthetic construct
  source 1..27: mol_type = other DNA; note = Chemically synthesized primer
tctgagtaggtgtcattctattctggg

SEQ ID NO: 1222 - DNA, 25 bp, synthetic construct
  source 1..25: mol_type = other DNA; note = Chemically synthesized primer
cactaggggttcctagatctctccc

SEQ ID NO: 1223 - DNA, 26 bp, synthetic construct
  source 1..26: mol_type = other DNA; note = Chemically synthesized probe
tcttcccaatcctcccccttgctgtc

SEQ ID NO: 1224 - protein, 123 aa, synthetic construct
TRVLSQVQLVQSGAEVKKPGASVKVSCKASGYTFSGYSTHWLRQVPGQGLEWIGWDNPSSGDTTYAENFRGRVTLTRDTSITTDYLEVRGLRSDDTAVYYCARGGDDYSFDHWGQGTLVTVSS

SEQ ID NO: 1225 - DNA, 354 bp, synthetic construct
  source 1..354: mol_type = other DNA
caggtgcagctggtgcagtctggggctgaggtgaagaagcctggggcctcagtgaaagtctnctgcaaggcttctggatacaccttcagnggctactctacacactggctgcgacaggtncctggacagggacttgagtggattggatgggacaaccctagtagtggtgacacgacctatgnagagaatnnncggggcagggtcaccntgaccagggacacgtccatcaccacagattacttggaagtgaggggtntaagatctgacgacacggccgtntattattgngccagaggnggagatgactacagctttgaccattggggtcagggcaccctggtcaccgtctcctca

SEQ ID NO: 1226 - protein, 105 aa, synthetic construct
SSELTQDPAVSVALGQTVRITCRGDSLRSYYASWYQQKPGQAPVLVIYGENNRPSGIPDRFSGSSSGDTASLTITGAQAEDEADYYCNSRDSSDHLLLFGQGTKL

SEQ ID NO: 1227 - DNA, 327 bp, synthetic construct
  source 1..327: mol_type = other DNA
tcttctgagctgactcaggacccagctgtgtctgtggccttgggacagacagtcaggatcacatgccgaggagacagcctcagaagttattatgcaagctggtaccaacagaagccaggacaggcccctgtacttgtcatctatggtgaaaacaaccgaccctcagggatcccagaccgattctctggctccagctcaggagacacagcttccttgaccatcactggggctcaggcggaagatgaggctgactattactgtaactcccgggacagcagtgatcaccttctcctattcggtggagggaccaagttgaccgtcctaggt

SEQ ID NO: 1228 - protein, 330 aa, Homo sapiens
ASTKGPSVFPLAPSSKSTSGGTAALGCLVKDYFPEPVTVSWNSGALTSGVHTFPAVLQSSGLYSLSSVVTVPSSSLGTQTYICNVNHKPSNTKVDKKAEPKSCDKTHTCPPCPAPELLGGPSVFLFPPKPKDTLMISRTPEVTCVVVDVSHEDPEVKFNWYVDGVEVHNAKTKPREEQYNSTYRVVSVLTVLHQDWLNGKEYKCKVSNKALPAPIEKTISKAKGQPREPQVYTLPPSRDELTKNQVSLTCLVKGFYPSDIAVEWESNGQPENNYKTTPPVLDSDGSFFLYSKLTVDKSRWQQGNVFSCSVMHEALHNHYTQKSLSLSPGK

SEQ ID NO: 1229 - DNA, 992 bp, Homo sapiens
  source 1..992: mol_type = unassigned DNA
ctagcaccaagggcccatcggtcttccccctggcaccctcctccaagagcacctctgggggcacagcggccctgggctgcctggtcaaggactacttccccgaaccggtgacggtgtcgtggaactcaggcgccctgaccagcggcgtgcacaccttcccggctgtcctacagtcctcaggactctactccctcagcagcgtggtgaccgtgccctccagcagcttgggcacccagacctacatctgcaacgtgaatcacaagcccagcaacaccaaggtggacaagaaagcagagcccaaatcttgtgacaaaactcacacatgcccaccgtgcccagcacctgaactcctggggggaccgtcagtcttcctcttccccccaaaacccaaggacaccctcatgatctcccggacccctgaggtcacatgcgtggtggtggacgtgagccacgaagaccctgaggtcaagttcaactggtacgtggacggcgtggaggtgcataatgccaagacaaagccgcgggaggagcagtacaacagcacgtaccgtgtggtcagcgtcctcaccgtcctgcaccaggactggctgaatggcaaggagtacaagtgcaaggtctccaacaaagccctcccagcccccatcgagaaaaccatctccaaagccaaagggcagccccgagaaccacaggtgtacaccctgcccccatcccgggatgagctgaccaagaaccaggtcagcctgacctgcctggtcaaaggcttctatcccagcgacatcgccgtggagtgggagagcaatgggcagccggagaacaactacaagaccacgcctcccgtgctggactccgacggctccttcttcctctacagcaagctcaccgtggacaagagcaggtggcagcaggggaacgtcttctcatgctccgtgatgcatgaggctctgcacaaccactacacgcagaagagcctctccctgtctccgggtaaatga

SEQ ID NO: 1230 - protein, 330 aa, synthetic construct
ASTKGPSVFPLAPSSKSTSGGTAALGCLVKDYFPEPVTVSWNSGALTSGVHTFPAVLQSSGLYSLSSVVTVPSSSLGTQTYICNVNHKPSNTKVDKKAEPKSCDKTHTCPPCPAPEAAGGPSVFLFPPKPKDTLMISRTPEVTCVVVDVSHEDPEVKFNWYVDGVEVHNAKTKPREEQYNSTYRVVSVLTVLHQDWLNGKEYKCKVSNKALPAPIEKTISKAKGQPREPQVYTLPPSRDELTKNQVSLTCLVKGFYPSDIAVEWESNGQPENNYKTTPPVLDSDGSFFLYSKLTVDKSRWQQGNVFSCSVMHEALHNHYTQKSLSLSPGK

SEQ ID NO: 1231 - DNA, 992 bp, synthetic construct
  source 1..992: mol_type = other DNA
ctagcaccaagggcccatcggtcttccccctggcaccctcctccaagagcacctctgggggcacagcggccctgggctgcctggtcaaggactacttccccgaaccggtgacggtgtcgtggaactcaggcgccctgaccagcggcgtgcacaccttcccggctgtcctacagtcctcaggactctactccctcagcagcgtggtgaccgtgccctccagcagcttgggcacccagacctacatctgcaacgtgaatcacaagcccagcaacaccaaggtggacaagaaagcagagcccaaatcttgtgacaaaactcacacatgcccaccgtgcccagcacctgaagccgccgggggaccgtcagtcttcctcttccccccaaaacccaaggacaccctcatgatctcccggacccctgaggtcacatgcgtggtggtggacgtgagccacgaagaccctgaggtcaagttcaactggtacgtggacggcgtggaggtgcataatgccaagacaaagccgcgggaggagcagtacaacagcacgtaccgtgtggtcagcgtcctcaccgtcctgcaccaggactggctgaatggcaaggagtacaagtgcaaggtctccaacaaagccctcccagcccccatcgagaaaaccatctccaaagccaaagggcagccccgagaaccacaggtgtacaccctgcccccatcccgggatgagctgaccaagaaccaggtcagcctgacctgcctggtcaaaggcttctatcccagcgacatcgccgtggagtgggagagcaatgggcagccggagaacaactacaagaccacgcctcccgtgctggactccgacggctccttcttcctctacagcaagctcaccgtggacaagagcaggtggcagcaggggaacgtcttctcatgctccgtgatgcatgaggctctgcacaaccactacacgcagaagagcctctccctgtctccgggtaaatga

SEQ ID NO: 1232 - protein, 97 aa, Homo sapiens
ASTKGPSVFPLAPSSKSTSGGTAALGCLVKDYFPEPVTVSWNSGALTSGVHTFPAVLQSSGLYSLSSVVTVPSSSLGTQTYICNVNHKPSNTKVDKK

SEQ ID NO: 1233 - DNA, 290 bp, Homo sapiens
  source 1..290: mol_type = unassigned DNA
ctagcaccaagggcccatcggtcttccccctggcaccctcctccaagagcacctctgggggcacagcggccctgggctgcctggtcaaggactacttccccgaaccggtgacggtgtcgtggaactcaggcgccctgaccagcggcgtgcacaccttcccggctgtcctacagtcctcaggactctactccctcagcagcgtggtgaccgtgccctccagcagcttgggcacccagacctacatctgcaacgtgaatcacaagcccagcaacaccaaggtggacaagaaa

SEQ ID NO: 1234 - protein, 110 aa, Homo sapiens
APELLGGPSVFLFPPKPKDTLMISRTPEVTCVVVDVSHEDPEVKFNWYVDGVEVHNAKTKPREEQYNSTYRVVSVLTVLHQDWLNGKEYKCKVSNKALPAPIEKTISKAK

SEQ ID NO: 1235 - DNA, 330 bp, Homo sapiens
  source 1..330: mol_type = unassigned DNA
gcacctgaactcctggggggaccgtcagtcttcctcttccccccaaaacccaaggacaccctcatgatctcccggacccctgaggtcacatgcgtggtggtggacgtgagccacgaagaccctgaggtcaagttcaactggtacgtggacggcgtggaggtgcataatgccaagacaaagccgcgggaggagcagtacaacagcacgtaccgtgtggtcagcgtcctcaccgtcctgcaccaggactggctgaatggcaaggagtacaagtgcaaggtctccaacaaagccctcccagcccccatcgagaaaaccatctccaaagccaaa

SEQ ID NO: 1236 - protein, 110 aa, synthetic construct
APEAAGGPSVFLFPPKPKDTLMISRTPEVTCVVVDVSHEDPEVKFNWYVDGVEVHNAKTKPREEQYNSTYRVVSVLTVLHQDWLNGKEYKCKVSNKALPAPIEKTISKAK

SEQ ID NO: 1237 - DNA, 330 bp, synthetic construct
  source 1..330: mol_type = other DNA
gcacctgaagccgccgggggaccgtcagtcttcctcttccccccaaaacccaaggacaccctcatgatctcccggacccctgaggtcacatgcgtggtggtggacgtgagccacgaagaccctgaggtcaagttcaactggtacgtggacggcgtggaggtgcataatgccaagacaaagccgcgggaggagcagtacaacagcacgtaccgtgtggtcagcgtcctcaccgtcctgcaccaggactggctgaatggcaaggagtacaagtgcaaggtctccaacaaagccctcccagcccccatcgagaaaaccatctccaaagccaaa

SEQ ID NO: 1238 - protein, 107 aa, Homo sapiens
GQPREPQVYTLPPSRDELTKNQVSLTCLVKGFYPSDIAVEWESNGQPENNYKTTPPVLDSDGSFFLYSKLTVDKSRWQQGNVFSCSVMHEALHNHYTQKSLSLSPGK

SEQ ID NO: 1239 - DNA, 324 bp, Homo sapiens
  source 1..324: mol_type = unassigned DNA
gggcagccccgagaaccacaggtgtacaccctgcccccatcccgggatgagctgaccaagaaccaggtcagcctgacctgcctggtcaaaggcttctatcccagcgacatcgccgtggagtgggagagcaatgggcagccggagaacaactacaagaccacgcctcccgtgctggactccgacggctccttcttcctctacagcaagctcaccgtggacaagagcaggtggcagcaggggaacgtcttctcatgctccgtgatgcatgaggctctgcacaaccactacacgcagaagagcctctccctgtctccgggtaaatga

SEQ ID NO: 1240 - protein, 16 aa, Homo sapiens
AEPKSCDKTHTCPPCP

SEQ ID NO: 1241 - DNA, 48 bp, Homo sapiens
  source 1..48: mol_type = unassigned DNA
gcagagcccaaatcttgtgacaaaactcacacatgcccaccgtgccca

SEQ ID NO: 1242 - protein, 453 aa, Homo sapiens
TRVLSQVQLVQSGAEVKKPGASVKVSCKASGYTFSGYSTHWLRQVPGQGLEWIGWDNPSSGDTTYAENFRGRVTLTRDTSITTDYLEVRGLRSDDTAVYYCARGGDDYSFDHWGQGTLVTVSSASTKGPSVFPLAPSSKSTSGGTAALGCLVKDYFPEPVTVSWNSGALTSGVHTFPAVLQSSGLYSLSSVVTVPSSSLGTQTYICNVNHKPSNTKVDKKAEPKSCDKTHTCPPCPAPELLGGPSVFLFPPKPKDTLMISRTPEVTCVVVDVSHEDPEVKFNWYVDGVEVHNAKTKPREEQYNSTYRVVSVLTVLHQDWLNGKEYKCKVSNKALPAPIEKTISKAKGQPREPQVYTLPPSRDELTKNQVSLTCLVKGFYPSDIAVEWESNGQPENNYKTTPPVLDSDGSFFLYSKLTVDKSRWQQGNVFSCSVMHEALHNHYTQKSLSLSPGK

SEQ ID NO: 1243 - protein, 453 aa, synthetic construct
TRVLSQVQLVQSGAEVKKPGASVKVSCKASGYTFSGYSTHWLRQVPGQGLEWIGWDNPSSGDTTYAENFRGRVTLTRDTSITTDYLEVRGLRSDDTAVYYCARGGDDYSFDHWGQGTLVTVSSASTKGPSVFPLAPSSKSTSGGTAALGCLVKDYFPEPVTVSWNSGALTSGVHTFPAVLQSSGLYSLSSVVTVPSSSLGTQTYICNVNHKPSNTKVDKKAEPKSCDKTHTCPPCPAPEAAGGPSVFLFPPKPKDTLMISRTPEVTCVVVDVSHEDPEVKFNWYVDGVEVHNAKTKPREEQYNSTYRVVSVLTVLHQDWLNGKEYKCKVSNKALPAPIEKTISKAKGQPREPQVYTLPPSRDELTKNQVSLTCLVKGFYPSDIAVEWESNGQPENNYKTTPPVLDSDGSFFLYSKLTVDKSRWQQGNVFSCSVMHEALHNHYTQKSLSLSPGK

SEQ ID NO: 1244 - protein, 5 aa, synthetic construct
GYSTH

SEQ ID NO: 1245 - protein, 17 aa, synthetic construct
WDNPSSGDTTYAENFRG

SEQ ID NO: 1246 - protein, 9 aa, synthetic construct
GGDDYSFDH

SEQ ID NO: 1247 - protein, 11 aa, synthetic construct
RGDSLRSYYAS

SEQ ID NO: 1248 - protein, 7 aa, synthetic construct
GENNRPS

SEQ ID NO: 1249 - protein, 11 aa, synthetic construct
NSRDSSDHLLL

SEQ ID NO: 1250 - protein, 121 aa, Homo sapiens; identical to SEQ ID NO: 845

SEQ ID NO: 1251 - protein, 113 aa, Homo sapiens; identical to SEQ ID NO: 846

SEQ ID NO: 1252 - protein, 119 aa, Homo sapiens; identical to SEQ ID NO: 847

SEQ ID NO: 1253 - protein, 119 aa, Homo sapiens; identical to SEQ ID NO: 848

SEQ ID NO: 1254 - protein, 119 aa, Homo sapiens; identical to SEQ ID NO: 848

SEQ ID NO: 1255 - protein, 119 aa, Homo sapiens; identical to SEQ ID NO: 850

SEQ ID NO: 1256 - protein, 119 aa, Homo sapiens; identical to SEQ ID NO: 851

SEQ ID NO: 1257 - protein, 118 aa, Homo sapiens; identical to SEQ ID NO: 852

SEQ ID NO: 1258 - protein, 119 aa, Homo sapiens; identical to SEQ ID NO: 853

SEQ ID NO: 1259 - protein, 119 aa, Homo sapiens; identical to SEQ ID NO: 848

SEQ ID NO: 1260 - protein, 119 aa, Homo sapiens; identical to SEQ ID NO: 855

SEQ ID NO: 1261 - protein, 116 aa, Homo sapiens; identical to SEQ ID NO: 856

SEQ ID NO: 1262 - protein, 119 aa, Homo sapiens; identical to SEQ ID NO: 857

SEQ ID NO: 1263 - protein, 122 aa, Homo sapiens; identical to SEQ ID NO: 858

SEQ ID NO: 1264 - protein, 118 aa, Homo sapiens; identical to SEQ ID NO: 859

SEQ ID NO: 1265 - protein, 118 aa, Homo sapiens; identical to SEQ ID NO: 859

SEQ ID NO: 1266 - protein, 116 aa, Homo sapiens; identical to SEQ ID NO: 861

SEQ ID NO: 1267 - protein, 118 aa, Homo sapiens; identical to SEQ ID NO: 862

SEQ ID NO: 1268 - protein, 122 aa, Homo sapiens; identical to SEQ ID NO: 863

SEQ ID NO: 1269 - protein, 119 aa, Homo sapiens; identical to SEQ ID NO: 864

SEQ ID NO: 1270 - protein, 119 aa, Homo sapiens; identical to SEQ ID NO: 851

SEQ ID NO: 1271 - protein, 121 aa, Homo sapiens; identical to SEQ ID NO: 866

SEQ ID NO: 1272 - protein, 118 aa, Homo sapiens; identical to SEQ ID NO: 867

SEQ ID NO: 1273 - protein, 112 aa, Homo sapiens; identical to SEQ ID NO: 868

SEQ ID NO: 1274 - protein, 111 aa, Homo sapiens; identical to SEQ ID NO: 869

SEQ ID NO: 1275 - protein, 112 aa, Homo sapiens; identical to SEQ ID NO: 870

SEQ ID NO: 1276 - protein, 112 aa, Homo sapiens; identical to SEQ ID NO: 871

SEQ ID NO: 1277 - protein, 112 aa, Homo sapiens; identical to SEQ ID NO: 872

SEQ ID NO: 1278 - protein, 111 aa, Homo sapiens; identical to SEQ ID NO: 873

SEQ ID NO: 1279 - protein, 111 aa, Homo sapiens; identical to SEQ ID NO: 874

SEQ ID NO: 1280 - protein, 111 aa, Homo sapiens; identical to SEQ ID NO: 875

SEQ ID NO: 1281 - protein, 112 aa, Homo sapiens; identical to SEQ ID NO: 876

SEQ ID NO: 1282 - protein, 112 aa, Homo sapiens; identical to SEQ ID NO: 877

SEQ ID NO: 1283 - protein, 111 aa, Homo sapiens; identical to SEQ ID NO: 878

SEQ ID NO: 1284 - protein, 111 aa, Homo sapiens; identical to SEQ ID NO: 879

SEQ ID NO: 1285 - protein, 112 aa, Homo sapiens; identical to SEQ ID NO: 880

SEQ ID NO: 1286 - protein, 112 aa, Homo sapiens; identical to SEQ ID NO: 881
  VARIANT 83: note = Any naturally occurring amino acid

SEQ ID NO: 1287 - protein, 110 aa, Homo sapiens; identical to SEQ ID NO: 882

SEQ ID NO: 1288 - protein, 112 aa, Homo sapiens; identical to SEQ ID NO: 883

SEQ ID NO: 1289 - protein, 112 aa, Homo sapiens; identical to SEQ ID NO: 883

SEQ ID NO: 1290 - protein, 111 aa, Homo sapiens; identical to SEQ ID NO: 885

SEQ ID NO: 1291 - protein, 112 aa, Homo sapiens; identical to SEQ ID NO: 886

SEQ ID NO: 1292 - protein, 109 aa, Homo sapiens; identical to SEQ ID NO: 887

SEQ ID NO: 1293 - protein, 109 aa, Homo sapiens; identical to SEQ ID NO: 888

SEQ ID NO: 1294 - protein, 458 aa, Homo sapiens; identical to SEQ ID NO: 889

SEQ ID NO: 1295 - protein, 437 aa, Mus musculus; identical to SEQ ID NO: 890

SEQ ID NO: 1296 - DNA, 38 bp, synthetic construct; identical to SEQ ID NO: 891
  source 1..38: mol_type = other DNA; note = Chemically synthesized primer

SEQ ID NO: 1297 - DNA, 32 bp, synthetic construct; identical to SEQ ID NO: 892
  source 1..32: mol_type = other DNA; note = Chemically synthesized primer

SEQ ID NO: 1298 - DNA, 35 bp, synthetic construct; identical to SEQ ID NO: 893
  source 1..35: mol_type = other DNA; note = Chemically synthesized primer

SEQ ID NO: 1299 - DNA, 31 bp, synthetic construct; identical to SEQ ID NO: 894
  source 1..31: mol_type = other DNA; note = Chemically synthesized primer

SEQ ID NO: 1300 - DNA, 41 bp, synthetic construct; identical to SEQ ID NO: 895
  source 1..41: mol_type = other DNA; note = Chemically synthesized primer

SEQ ID NO: 1301 - DNA, 32 bp, synthetic construct; identical to SEQ ID NO: 896
  source 1..32: mol_type = other DNA; note = Chemically synthesized primer

SEQ ID NO: 1302 - DNA, 35 bp, synthetic construct; identical to SEQ ID NO: 897
  source 1..35: mol_type = other DNA; note = Chemically synthesized primer

SEQ ID NO: 1303 - DNA, 26 bp, synthetic construct
  source 1..26: mol_type = other DNA; note = Chemically synthesized primer
atagcacctaggacggtcagcttggt

SEQ ID NO: 1304 - protein, 5 aa, synthetic construct
  source 1..5: note = Portion of CDR1 heavy chain sequence
SYAMS

SEQ ID NO: 1305-1306 - skipped (2 entries)

SEQ ID NO: 1307 - protein, 17 aa, synthetic construct
  source 1..17: note = Portion of CDR2 heavy chain sequence
  VARIANT 4..5: note = Any naturally occurring amino acid
  VARIANT 8: note = Any naturally occurring amino acid
  VARIANT 10..11: note = Any naturally occurring amino acid
AISXXGGXTXXADSVKG

SEQ ID NO: 1308 - protein, 17 aa, synthetic construct
  source 1..17: note = Portion of CDR2 heavy chain sequence
AISGSGGSTTTADSVKG

SEQ ID NO: 1309 - protein, 13 aa, synthetic construct
  source 1..13: note = Portion of CDR3 heavy chain sequence
  VARIANT 9: note = Any naturally occurring amino acid
NGNYRGSLXAFDI

SEQ ID NO: 1310 - protein, 14 aa, synthetic construct
  source 1..14: note = Portion of CDR1 heavy chain sequence
TGSSSNIGAGYDVH

SEQ ID NO: 1311 - protein, 7 aa, synthetic construct
  source 1..7: note = Portion of CDR2 heavy chain sequence
GNNNRPS

SEQ ID NO: 1312 - protein, 12 aa, synthetic construct
  source 1..12: note = Portion of CDR3 heavy chain sequence
QSYDSSLSAWVV

SEQ ID NO: 1313 - protein, 6 aa, synthetic construct
  source 1..6: note = consensus sequence
EEDLPE

SEQ ID NO: 1314 - protein, 10 aa, synthetic construct
  source 1..10: note = Portion of CDR3 heavy chain sequence
NGNYRGAFDI

SEQ ID NO: 1315 - DNA, 354 bp, synthetic construct
  source 1..354: mol_type = other DNA
caggtgcagctggtgcagagcggcgcggaagtgaaaaaaccgggcgcgagcgtgaaagtgagctgcaaagcgagcggctatacctttgcgagcgcgtggatgcattggatgcgccaggcgccgggccagggcctggaatggattggctggattaacccgggcaacgtgaacaccaaatataacgaaaaatttaaaggccgcgcgaccctgaccgtggataccagcaccaacaccgcgtatatggaactgagcagcctgcgcagcgaagataccgcggtgtattattgcgcgcgcagcacctattatcgcccgctggattattggggccagggcaccctggtgaccgtgagcagc

SEQ ID NO: 1316 - protein, 118 aa, synthetic construct; identical to SEQ ID NO: 1199

SEQ ID NO: 1317 - DNA, 336 bp, synthetic construct
  source 1..336: mol_type = other DNA
gatattgtgatgacccagagcccggatagcctggcggtgagcctgggcgaacgcgcgaccattaactgcaaaagcagccagagcattctgtatagcagcaaccagaaaaactatctggcgtggtatcagcagaaaccgggccagagcccgaaactgctgatttattgggcgagcacccgcgaaagcggcgtgccggatcgctttagcggcagcggcagcggcaccgattttaccctgaccattagcagcctgcaggcggaagatgtggcggtgtattattgccatcagtatatgagcagctatacctttggccagggcaccaaactggaaattaaa

SEQ ID NO: 1318 - protein, 112 aa, synthetic construct; identical to SEQ ID NO: 1201

SEQ ID NO: 1319 - DNA, 981 bp, synthetic construct
  source 1..981: mol_type = other DNA
gcgagcaccaaaggcccgagcgtgtttccgctggcgccgtgcagccgcagcaccagcgaaagcaccgcggcgctgggctgcctggtgaaagattattttccggaaccggtgaccgtgagctggaacagcggcgcgctgaccagcggcgtgcatacctttccggcggtgctgcagagcagcggcctgtatagcctgagcagcgtggtgaccgtgccgagcagcagcctgggcaccaaaacctatacctgcaacgtggatcataaaccgagcaacaccaaagtggataaacgcgtggaaagcaaatatggcccgccgtgcccgagctgcccggcgccggaatttctgggcggcccgagcgtgtttctgtttccgccgaaaccgaaagataccctgatgattagccgcaccccggaagtgacctgcgtggtggtggatgtgagccaggaagatccggaagtgcagtttaactggtatgtggatggcgtggaagtgcataacgcgaaaaccaaaccgcgcgaagaacagtttaacagcacctatcgcgtggtgagcgtgctgaccgtgctgcatcaggattggctgaacggcaaagaatataaatgcaaagtgagcaacaaaggcctgccgagcagcattgaaaaaaccattagcaaagcgaaaggccagccgcgcgaaccgcaggtgtataccctgccgccgagcccggaagaaatgaccaaaaaccaggtgagcctgacctgcctggtgaaaggcttttatccgagcgatattgcggtggaatgggaaagcaacggccagccggaaaacaactataaaaccaccccgccggtgctggatagcgatggcagcttttttctgtatagccgcctgaccgtggataaaagccgctggcaggaaggcaacgtgtttagctgcagcgtgatgcatgaagcgctgcataaccattatacccagaaaagcctgagcctgagcctgggcaaa

SEQ ID NO: 1320 - protein, 327 aa, synthetic construct
ASTKGPSVFPLAPCSRSTSESTAALGCLVKDYFPEPVTVSWNSGALTSGVHTFPAVLQSSGLYSLSSVVTVPSSSLGTKTYTCNVDHKPSNTKVDKRVESKYGPPCPSCPAPEFLGGPSVFLFPPKPKDTLMISRTPEVTCVVVDVSQEDPEVQFNWYVDGVEVHNAKTKPREEQFNSTYRVVSVLTVLHQDWLNGKEYKCKVSNKGLPSSIEKTISKAKGQPREPQVYTLPPSPEEMTKNQVSLTCLVKGFYPSDIAVEWESNGQPENNYKTTPPVLDSDGSFFLYSRLTVDKSRWQEGNVFSCSVMHEALHNHYTQKSLSLSLGK

SEQ ID NO: 1321 - DNA, 975 bp, synthetic construct
  source 1..975: mol_type = other DNA
accaaaggcccgagcgtgtttccgctggcgccgtgcagccgcagcaccagcgaaagcaccgcggcgctgggctgcctggtgaaagattattttccggaaccggtgaccgtgagctggaacagcggcgcgctgaccagcggcgtgcatacctttccggcggtgctgcagagcagcggcctgtatagcctgagcagcgtggtgaccgtgccgagcagcagcctgggcaccaaaacctatacctgcaacgtggatcataaaccgagcaacaccaaagtggataaacgcgtggaaagcaaatatggcccgccgtgcccgccgtgcccggcgccggaatttctgggcggcccgagcgtgtttctgtttccgccgaaaccgaaagataccctgatgattagccgcaccccggaagtgacctgcgtggtggtggatgtgagccaggaagatccggaagtgcagtttaactggtatgtggatggcgtggaagtgcataacgcgaaaaccaaaccgcgcgaagaacagtttaacagcacctatcgcgtggtgagcgtgctgaccgtgctgcatcaggattggctgaacggcaaagaatataaatgcaaagtgagcaacaaaggcctgccgagcagcattgaaaaaaccattagcaaagcgaaaggccagccgcgcgaaccgcaggtgtataccctgccgccgagcccggaagaaatgaccaaaaaccaggtgagcctgacctgcctggtgaaaggcttttatccgagcgatattgcggtggaatgggaaagcaacggccagccggaaaacaactataaaaccaccccgccggtgctggatagcgatggcagcttttttctgtatagcaaactgaccgtggataaaagccgctggcaggaaggcaacgtgtttagctgcagcgtgatgcatgaagcgctgcataaccattatacccagaaaagcctgagcctgagcctgggcaaa

SEQ ID NO: 1322 - protein, 325 aa, synthetic construct
TKGPSVFPLAPCSRSTSESTAALGCLVKDYFPEPVTVSWNSGALTSGVHTFPAVLQSSGLYSLSSVVTVPSSSLGTKTYTCNVDHKPSNTKVDKRVESKYGPPCPPCPAPEFLGGPSVFLFPPKPKDTLMISRTPEVTCVVVDVSQEDPEVQFNWYVDGVEVHNAKTKPREEQFNSTYRVVSVLTVLHQDWLNGKEYKCKVSNKGLPSSIEKTISKAKGQPREPQVYTLPPSPEEMTKNQVSLTCLVKGFYPSDIAVEWESNGQPENNYKTTPPVLDSDGSFFLYSKLTVDKSRWQEGNVFSCSVMHEALHNHYTQKSLSLSLGK

SEQ ID NO: 1323 - protein, 8 aa, synthetic construct
GYTFASAW

SEQ ID NO: 1324 - protein, 12 aa, synthetic construct
QSILYSSNQKNY

SEQ ID NO: 1325 - protein, 8 aa, synthetic construct
INPGNVNT

SEQ ID NO: 1326 - protein, 6 aa, synthetic construct
WASTRE

SEQ ID NO: 1327 - protein, 9 aa, synthetic construct
STYYRPLDY

SEQ ID NO: 1328 - protein, 8 aa, synthetic construct
HQYMSSYT

SEQ ID NO: 1329 - DNA, 354 bp, synthetic construct; identical to SEQ ID NO: 1182
  source 1..354: mol_type = other DNA

SEQ ID NO: 1330 - protein, 118 aa, synthetic construct; identical to SEQ ID NO: 1183

SEQ ID NO: 1331 - DNA, 336 bp, synthetic construct; identical to SEQ ID NO: 1184
  source 1..336: mol_type = other DNA

SEQ ID NO: 1332 - protein, 112 aa, synthetic construct; identical to SEQ ID NO: 1185

SEQ ID NO: 1333 - DNA, 354 bp, synthetic construct; identical to SEQ ID NO: 1186
  source 1..354: mol_type = other DNA

SEQ ID NO: 1334 - protein, 118 aa, synthetic construct; identical to SEQ ID NO: 1187

SEQ ID NO: 1335 - DNA, 336 bp, synthetic construct; identical to SEQ ID NO: 1188
  source 1..336: mol_type = other DNA

SEQ ID NO: 1336 - protein, 112 aa, synthetic construct; identical to SEQ ID NO: 1189

SEQ ID NO: 1337 - DNA, 354 bp, synthetic construct; identical to SEQ ID NO: 1190
  source 1..354: mol_type = other DNA

SEQ ID NO: 1338 - protein, 118 aa, synthetic construct; identical to SEQ ID NO: 1191

SEQ ID NO: 1339 - DNA, 336 bp, synthetic construct; identical to SEQ ID NO: 1192
  source 1..336: mol_type = other DNA

SEQ ID NO: 1340 - protein, 112 aa, synthetic construct; identical to SEQ ID NO: 1193

SEQ ID NO: 1341 - DNA, 354 bp, synthetic construct; identical to SEQ ID NO: 1194
  source 1..354: mol_type = other DNA

SEQ ID NO: 1342 - protein, 118 aa, synthetic construct; identical to SEQ ID NO: 1195

SEQ ID NO: 1343 - DNA, 336 bp, synthetic construct; identical to SEQ ID NO: 1196
  source 1..336: mol_type = other DNA

SEQ ID NO: 1344 - protein, 112 aa, synthetic construct; identical to SEQ ID NO: 1197

SEQ ID NO: 1345 - protein, 8 aa, synthetic construct
GYTFASYY

SEQ ID NO: 1346 - protein, 8 aa, synthetic construct
GYTFASYY

SEQ ID NO: 1347 - protein, 8 aa, synthetic construct
GYTFASSW

SEQ ID NO: 1348 - protein, 9 aa, synthetic construct
STWYRPLDY

SEQ ID NO: 1349 - protein, 9 aa, synthetic construct
STWYRPNDY

SEQ ID NO: 1350 - protein, 9 aa, synthetic construct
TTRYRPLDY

SEQ ID NO: 1351 - protein, 9 aa, synthetic construct
LTYYRPPDY

SEQ ID NO: 1352 - protein, 8 aa, synthetic construct
HQYLSSYT

SEQ ID NO: 1353 - protein, 8 aa, synthetic construct
HQYISSYT

SEQ ID NO: 1354 - protein, 8 aa, synthetic construct
HQYKSSYT

SEQ ID NO: 1355 - protein, 8 aa, synthetic construct
HQYRSSYT

SEQ ID NO: 1356 - protein, 8 aa, synthetic construct
HQYYSSYT

SEQ ID NO: 1357 - DNA, 354 bp, synthetic construct; identical to SEQ ID NO: 966
  source 1..354: mol_type = other DNA

SEQ ID NO: 1358 - protein, 118 aa, synthetic construct; identical to SEQ ID NO: 967

SEQ ID NO: 1359 - DNA, 336 bp, synthetic construct; identical to SEQ ID NO: 968
  source 1..336: mol_type = other DNA

SEQ ID NO: 1360 - protein, 112 aa, synthetic construct; identical to SEQ ID NO: 969

SEQ ID NO: 1361 - DNA, 360 bp, synthetic construct
  source 1..360: mol_type = other DNA
gaggtgcagctggtggagtctggggctgaggtgaagaagcctggggcctcagtgaaggtctcctgcaagacttctggatacaccttcaccgaccactatatccactgggtgcgacaggcccctggacaagggcttgagtggatgggatggatcaaccctagcagtggtggcacagagtatgcacagaagtttcagggcagggtcaccatgaccagggacacgcccattagcacggcctacatggatctgagcgggctgagatctgacgacacggccgtttattactgtgcgagagagactatcggtggctggaacgctttggacgtctggggccaaggaaccctggtcaccgtctcctca

SEQ ID NO: 1362 - protein, 120 aa, synthetic construct
EVQLVESGAEVKKPGASVKVSCKTSGYTFTDHYIHWVRQAPGQGLEWMGWINPSSGGTEYAQKFQGRVTMTRDTPISTAYMDLSGLRSDDTAVYYCARETIGGWNALDVWGQGTLVTVSS

SEQ ID NO: 1363 - DNA, 333 bp, synthetic construct
  source 1..333: mol_type = other DNA
cagcctgtgctgactcagccaccctcagcgtctgggacccccgggcagagggtcaccatctcttgttctggaagcagctccaacatcggaattaatactgtaaactggtaccagcagctcccaagaacgccccccaaactcctcatctatactaataatcagcggccctcaggggtccctgaccgattctctggctccaagtctgacacctcagcctccctggccatcagtggcctccagtctgaggatgaggctgattattactgtgcagcttgggatgacaccctgaatggtccactattcggcggagggaccaaggtgaccgtcctaggt

SEQ ID NO: 1364 - protein, 111 aa, synthetic construct
QPVLTQPPSASGTPGQRVTISCSGSSSNIGINTVNWYQQLPRTPPKLLIYTNNQRPSGVPDRFSGSKSDTSASLAISGLQSEDEADYYCAAWDDTLNGPLFGGGTKVTVLG

SEQ ID NO: 1365 - DNA, 357 bp, synthetic construct
  source 1..357: mol_type = other DNA
gaggtgcagctggtgcagtctgggtctgagttgaagaagcctggggcctcagtgaaggtctcctgcaaggcttctggatacaccttcaccggctactatatgcactgggtgcgacaggcccctggacaagggcttgagtggatgggatggatcaaccctaacagtggtggcacaaactatgcacagaagtttcagggcagggtcaccgtgaccacagacacgtccacgagcacagcctacatggagctgaggagcctgagatctgacgacacggccgtctattactgtgcgagagagggtgttcactcggatgcttttgatgtgtggggccaagggaccacggtcaccgtctcctca

SEQ ID NO: 1366 - protein, 119 aa, synthetic construct
EVQLVQSGSELKKPGASVKVSCKASGYTFTGYYMHWVRQAPGQGLEWMGWINPNSGGTNYAQKFQGRVTVTTDTSTSTAYMELRSLRSDDTAVYYCAREGVHSDAFDVWGQGTTVTVSS

SEQ ID NO: 1367 - DNA, 321 bp, synthetic construct
  source 1..321: mol_type = other DNA
gaaacgacactcacgcagtctccagccaccctgtctgtgtctccaggggaaagggccaccctctcctgcagggccagtcagagtgtttacaccaacttagcctggtaccaacagaaacctggccaggctcccagtctcctcatctatggtgcatccagccgggccaccggcatcccagacagattcagtggcagcgggtctgggacagacttcactctcaccatcagcagactggagcctgaagattttgcagtgtattactgtcagcagtatggtagctcacatttcactttcggccctgggaccaaagtggatatcaaa

SEQ ID NO: 1368 - protein, 107 aa, synthetic construct
ETTLTQSPATLSVSPGERATLSCRASQSVYTNLAWYQQKPGQAPSLLIYGASSRATGIPDRFSGSGSGTDFTLTISRLEPEDFAVYYCQQYGSSHFTFGPGTKVDIK

SEQ ID NO: 1369 - DNA, 360 bp, synthetic construct
  source 1..360: mol_type = other DNA
gaggtgcagctggtgcagtctggggctgaggtgaagaagcctggggcctcagtgaaggtctcctgcaagacttctggatacaccttcaccgaccactatatccactgggtgcgacaggcccctggacaagggcttgagtggatgggatggatcaaccctagcagtggtggcacagagtatgcacagaagtttcagggcagggtcaccatgaccagggacacgcccattagcacggcctacatggatctgagcgggctgagatctgacgacacggccgtttattactgtgcgagagagactatcggtggctggaacgctttggacgtctggggccaagggaccacggtcaccgtctcctca

SEQ ID NO: 1370 - protein, 120 aa, synthetic construct
EVQLVQSGAEVKKPGASVKVSCKTSGYTFTDHYIHWVRQAPGQGLEWMGWINPSSGGTEYAQKFQGRVTMTRDTPISTAYMDLSGLRSDDTAVYYCARETIGGWNALDVWGQGTTVTVSS

SEQ ID NO: 1371 - DNA, 333 bp, synthetic construct
  source 1..333: mol_type = other DNA
cagtctgtgctgactcagccaccctcagcgtctgggtcccccgggcagagggtcaccatgtcttgctctggaagcagctccaccatcgggaggcattctgtaaactggtaccagcagctcccaggaacggcccccaaactcctcatctatgctaacaatcagcggccctcaggggtccctggccgattctctgcctccaagtctgacacctcagcctccctggccatcagtgggctccggtccgaggatgaggctaattattactgtgcagcgtgggatgacagtctcagtggcgtgctctttggcggtgggaccaaggtgaccgtcctaggt

SEQ ID NO: 1372 - protein, 111 aa, synthetic construct
QSVLTQPPSASGSPGQRVTMSCSGSSSTIGRHSVNWYQQLPGTAPKLLIYANNQRPSGVPGRFSASKSDTSASLAISGLRSEDEANYYCAAWDDSLSGVLFGGGTKVTVLG

SEQ ID NO: 1373 - DNA, 360 bp, synthetic construct
  source 1..360: mol_type = other DNA
gaggtgcagctggtggagtctggggctgaggtgaagaagcctggggcctcagtgaaggtctcctgcaagacttctggatacaccttcaccgaccactatatccactgggtgcgacaggcccctggacaagggcttgagtggatgggatggatcaaccctagcagtggtggcacagagtatgcacagaagtttcagggcagggtcaccatgaccagggacacgcccattagcacggcctacatggatctgagcgggctgagatctgacgacacggccgtttattactgtgcgagagagactatcggtggctggaacgctttggacgtctggggccaaggcaccctggtcaccgtctcctca

SEQ ID NO: 1374 - protein, 120 aa, synthetic construct; identical to SEQ ID NO: 1362

SEQ ID NO: 1375 - DNA, 327 bp, synthetic construct
  source 1..327: mol_type = other DNA
ctgcctgtgctgactcagccaccctcagtgtcagtggccccaggacagacggccaggataacctgtgggggacacaagattggaactaaaagtgtgcactggtaccagcagaagccaggccaggcccctgtactggtcgtctatgatgatcgcgaccggccctcagggatccctgagcgattctctggctccaactctgggggcacggccaccctgaccatcagcagggtcgaagccggggatgaggccgactattactgtcaggtgtgggatagtaatagtgatcatgtggtgttcggcggagggaccaagctgaccgtcctaagt

SEQ ID NO: 1376 - protein, 109 aa, synthetic construct
MPVLTQPPSVSVAPGQTARITCGGHKIGTKSVHWYQQKPGQAPVLVVYDDRDRPSGIPERFSGSNSGGTATLTISRVEAGDEADYYCQVWDSNSDHVVFGGGTKLTVLS

SEQ ID NO: 1377 - DNA, 360 bp, synthetic construct
  source 1..360: mol_type = other DNA
gaggtgcagctggtgcagtctggggctgatgtgaagaagcctggggcctcagtgaaggtctcctgcaaggcttctggatacaccttcaccggctactatatacactgggtgcgacaggcccctggacaagggcttgagtggatgggatggatcaaccctaacagtggtggcacaaactatgcacagaagtttcagggcagggtcaccatgaccagggacacgtccatcagcacagcctacatggagctgagcaggctgagatctgacgacacggccgtctatttttgtgtgagagaggtgaaagattactattattacatggacgtctggggcagagggaccacggtcaccgtctcctca

SEQ ID NO: 1378 - protein, 120 aa, synthetic construct
EVQLVQSGADVKKPGASVKVSCKASGYTFTGYYIHWVRQAPGQGLEWMGWINPNSGGTNYAQKFQGRVTMTRDTSISTAYMELSRLRSDDTAVYFCVREVKDYYYYMDVWGRGTTVTVSS

SEQ ID NO: 1379 - DNA, 336 bp, synthetic construct
  source 1..336: mol_type = other DNA
aattttatgctgactcagccccactctgtgtcggaatctccggggaagacggttaccatctcgtgcacccgcagcagcggcagcattgccagcaactccgtgcagtggtacctgcagcgcccgggcagtgcccccaccactctgatctttgacaataaacaaagaccgtctggggtccctgatcgcttctctggctccatcgacagctcctccaactctgcctccctcagcatctctgggctgacgactgaggacgaggctgactatttctgtcagtcttatgatgacagtgagcaagtggtgttcggcggagggaccaagctgaccgtcctaagt

SEQ ID NO: 1380 - protein, 112 aa, synthetic construct
NFMLTQPHSVSESPGKTVTISCTRSSGSIASNSVQWYLQRPGSAPTTLIFDNKQRPSGVPDRFSGSIDSSSNSASLSISGLTTEDEADYFCQSYDDSEQVVFGGGTKLTVLS

SEQ ID NO: 1381 - DNA, 363 bp, synthetic construct
  source 1..363: mol_type = other DNA
gaggtgcagctggtggagtctggggctgaggtgaagaagcctggggcctcagtgaaggtctcctgcaaggcttctggatacaccttcaccggctactatatgcactgggtgcgacaggcccctggacaagggcttgagtggttggggtgggtcaaccctcacagtggtggcacaaactatgcacagaagtttcagggcagggtcaccatgaccagggacacgtccatcagcacagcctacatggagctgagcagactgagatctgacgacacggccgtatattactgtgcgagagagactgatatctctgctaattatcactttgactactggggccagggcaccctggtcaccgtctcctca

SEQ ID NO: 1382 - protein, 121 aa, synthetic construct
EVQLVESGAEVKKPGASVKVSCKASGYTFTGYYMHWVRQAPGQGLEWLGWVNPHSGGTNYAQKFQGRVTMTRDTSISTAYMELSRLRSDDTAVYYCARETDISANYHFDYWGQGTLVTVSS

SEQ ID NO: 1383 - DNA, 336 bp, synthetic construct
  source 1..336: mol_type = other DNA
cagtctgccctgactcagcctgcctccgtgtctgggtctcctggacagtcgatcaccatctcctgcactggaaccagcagtgatgttgggagttataacgctgtctcctggtaccaacaccacccaggcaaagcccccaaactcatgatttatgaggtcagtaagcggccctcaggggtttctaatcggttctctggctccaagtctggcaacacggcctccctgacaatctctgggctccgggctgaggacgaggctgattattattgtgcaacatgggatgacagcctgaaaggtccggtgttcggcggagggaccaagctgaccgtcctgggt

SEQ ID NO: 1384 - protein, 113 aa, synthetic construct
QSALTQPASVSGSPGQSITISCTGTSSDVGSYNAVSWYQHHPGKAPKLMIYEVSKRPSGVSNRFSGSKSGNTASLTISGLRAEDEADYYCATWDDSLKGPVFGGGTKLTVLGE

SEQ ID NO: 1385 - DNA, 360 bp, synthetic construct
  source 1..360: mol_type = other DNA
gaggtgcagctggtgcagtctggggctgaggtgaagaagcctggggcctcagtgaaggtctcctgcaaggcttctggatacaccttcaccggctactatatgcactgggtgcgacaggcccctggacaagggcttgaatggatgggatggatcaaccctaaaactggtgacacaaactatgcacagaagtttcagggcagggtcgccttgagcagggacacgtccttcaacacagcctacatggacctgagcagcctcagatctgacgacacggccgtctattactgtgcgagagagggcctgtcgaccagcagtccccttgactactggggccagggaaccctggtcaccgtctcctca

SEQ ID NO: 1386 - protein, 120 aa, synthetic construct
EVQLVQSGAEVKKPGASVKVSCKASGYTFTGYYMHWVRQAPGQGLEWMGWINPKTGDTNYAQKFQGRVALSRDTSFNTAYMDLSSLRSDDTAVYYCAREGLSTSSPLDYWGQGTLVTVSS

SEQ ID NO: 1387 - DNA, 327 bp, synthetic construct
  source 1..327: mol_type = other DNA
cagcctgggctgactcagccaccctcagtgtcagtggccccaggacagtcggccaagattacctgtggagaaaacgaacttgcaacaaatattgtacactggtaccagcagaagccaggccaggcccctgtgctggtcatctatcatgataacgaccggccctcagggatccctgagcgattctctggctccaacgctgggaacacggccaccctgaccatcagcagggtcgaagccggggatgaggccgacttttactgtcagctgtgggatagtgctagtgatcaagtggtcttcggcggagggaccacgttgaccgtcctaggt

SEQ ID NO: 1388 - protein, 109 aa, synthetic construct
QPGLTQPPSVSVAPGQSAKITCGENELATNIVHWYQQKPGQAPVLVIYHDNDRPSGIPERFSGSNAGNTATLTISRVEAGDEADFYCQLWDSASDQVVFGGGTTLTVLG

SEQ ID NO: 1389 - DNA, 363 bp, synthetic construct
  source 1..363: mol_type = other DNA
gaggtgcagctggtgcagtcaggggctgaggtgaagaggcctggggcctcattgaaggtttcctgcaaggcatctggatacaccttcaccagccactatatacactgggtgcgacaggcccccggacaagggcttgagtggatgggatggatcaacactggcaatggtgacacaagatattcacagaggttccagggcagagtcaccgttaccagggacacatccgcgagcacagtctacatggaactgagcagcctgagatctgaagacacggccgtgtattactgtgcgagagagtctagcagcagctggtttgttgcttttgatgtctggggccaagggaccacggtcaccgtctcctca

SEQ ID NO: 1390 - protein, 121 aa, synthetic construct
EVQLVQSGAEVKRPGASLKVSCKASGYTFTSHYIHWVRQAPGQGLEWMGWINTGNGDTRYSQRFQGRVTVTRDTSASTVYMELSSLRSEDTAVYYCARESSSSWFVAFDVWGQGTTVTVSS

SEQ ID NO: 1391 - DNA, 327 bp, synthetic construct
  source 1..327: mol_type = other DNA
cagcctgtgctgactcagccaccctcggtgtcattggccccaggacagacggccaggattacctgttcggaaaagaacattcgaagtaaaagagtgcactggtaccagcagaagccaggccaggcccctgtcctggtcatgtattctgataacggccggcgctcagggatccctgaccgattttctggctccaactctgggaacacggccaccctgaccatcaccagggtcgaagccggtgatgagggcgacttttactgtcaggtgtgggatccgattactgatcaggtggttttcggcggagggaccaagctgaccgtcctaggt

SEQ ID NO: 1392 - protein, 109 aa, synthetic construct
QPVLTQPPSVSLAPGQTARITCSEKNIRSKRVHWYQQKPGQAPVLVMYSDNGRRSGIPDRFSGSNSGNTATLTITRVEAGDEGDFYCQVWDPITDQVVFGGGTKLTVLG

SEQ ID NO: 1393 - DNA, 372 bp, synthetic construct
  source 1..372: mol_type = other DNA
caggtgcagctggtgcagtctggggctgaggtgaagcagcctgggtcctcagtgaaggtctcctgtaaggcttctggatacaccttcaccggctactatatgcactgggtgcgacaggcccctggagaagggcttgagtggctgggatggatcaaccctcacagtggtggcacaaactatgcacagaagttccagggcagagtcacgattaccgcggacaaatccacgagcacagcctacatggagctgagcagcctgagatctgaggacacggctgtgtattactgtgcgagggagattgtggtggtgactgctccggctgctgcggctatggacgtctggggccaaggcaccctggtcaccgtctcctca

SEQ ID NO: 1394 - protein, 124 aa, synthetic construct
QVQLVQSGAEVKQPGSSVKVSCKASGYTFTGYYMHWVRQAPGEGLEWLGWINPHSGGTNYAQKFQGRVTITADKSTSTAYMELSSLRSEDTAVYYCAREIVVVTAPAAAAMDVWGQGTLVTVSS

SEQ ID NO: 1395 - DNA, 333 bp, synthetic construct
  source 1..333: mol_type = other DNA
cagtctgtgctgactcagccaccctccgcgtccgggtctcctggacagtcagtcaccatctcctgcactggaagcagcagtgacgttgctatttatgaccgtgtctcctggtaccagcagcccccaggcacagcccccaaactcattctttatgatgtccatgatcggccctcaggggtccctgatcgcttctctgggtccaagtctggcaacacggcctccctgaccatctctgggctccaggctgaggacgaggctgattattactgcagttcatacacaaccagcggcacttttgtcttcggaagtgggaccaaggtcaccgtcctaggt

SEQ ID NO: 1396 - protein, 111 aa, synthetic construct
QSVLTQPPSASGSPGQSVTISCTGSSSDVAIYDRVSWYQQPPGTAPKLILYDVHDRPSGVPDRFSGSKSGNTASLTISGLQAEDEADYYCSSYTTSGTFVFGSGTKVTVLG

SEQ ID NO: 1397 - DNA, 366 bp, synthetic construct
  source 1..366: mol_type = other DNA
gaggtgcagctggtgcagtctggggctgaggtgaagaagcctggggcctcagtgaacgtctcctgtaaggcttctggatacaccttcaccggctactatatgcactgggtgcgacaggcccctggacaagggcttgagtggatgggatggatcaaccccaacagtggtggcacaaactatgcacagaagtttcagggcagggtcaccgtgaccacagacacgtccaacagcacagcctacatggagctgaacaggctgaaatctgacgacacggccgtgtattattgtgcgagagaggggtccggggaccttgattccttatacatggacgtctggggcaaagggacaatggtcaccgtctcttca

SEQ ID NO: 1398 - DNA, 324 bp, synthetic construct
  source 1..324: mol_type = other DNA
tcctatgagctgactcagccaccctcggtgtcagtggccccaggacagacggccaggattacctgtggggcaaacaacattggaagtaaaagtgtgcactggtaccagcagaagccaggccaggcccctgtgctggtcgtctatgatgatagcgaccggccctcagggatccctgagcgattctctggctccaactctgggaacacggccaccctgaccatcaccagggtcgaagccggggatgaggccgactattactgtcagctatgggatggtgggagtgatgtggttttcggcggagggaccaagctgaccgtcctaggt

SEQ ID NO: 1399 - protein, 122 aa, synthetic construct
EVQLVQSGAEVKKPGASVNVSCKASGYTFTGYYMHWVRQAPGQGLEWMGWINPNSGGTNYAQKFQGRVTVTTDTSNSTAYMELNRLKSDDTAVYYCAREGSGDLDSLYMDVWGKGTMVTVSS

SEQ ID NO: 1400 - protein, 108 aa, synthetic construct
SYELTQPPSVSVAPGQTARITCGANNIGSKSVHWYQQKPGQAPVLVVYDDSDRPSGIPERFSGSNSGNTATLTITRVEAGDEADYYCQLWDGGSDVVFGGGTKLTVLG

SEQ ID NO: 1401 - DNA, 360 bp, synthetic construct; identical to SEQ ID NO: 1361
  source 1..360: mol_type = other DNA

SEQ ID NO: 1402 - protein, 120 aa, synthetic construct; identical to SEQ ID NO: 1362

SEQ ID NO: 1403 - DNA, 333 bp, synthetic construct; identical to SEQ ID NO: 1363
  source 1..333: mol_type = other DNA

SEQ ID NO: 1404 - protein, 111 aa, synthetic construct; identical to SEQ ID NO: 1364

SEQ ID NO: 1405 - protein, 8 aa, synthetic construct
GYTFTDHY

SEQ ID NO: 1406 - protein, 8 aa, synthetic construct
INPSSGGT

SEQ ID NO: 1407 - protein, 13 aa, synthetic construct
ARETIGGWNALDV

SEQ ID NO: 1408 - protein, 8 aa, synthetic construct
SSNIGINT

SEQ ID NO: 1409 - skipped

SEQ ID NO: 1410 - protein, 11 aa, synthetic construct
AAWDDTLNGPL

SEQ ID NO: 1411 - protein, 8 aa, synthetic construct
GYTFTGYY

SEQ ID NO: 1412 - protein, 8 aa, synthetic construct
INPNSGGT

SEQ ID NO: 1413 - protein, 12 aa, synthetic construct
AREGVHSDAFDV

SEQ ID NO: 1414 - protein, 6 aa, synthetic construct
QSVYTN

SEQ ID NO: 1415 - skipped

SEQ ID NO: 1416 - protein, 9 aa, synthetic construct
QQYGSSHFT

SEQ ID NO: 1417 - protein, 8 aa, synthetic construct
GYTFTDHY

SEQ ID NO: 1418 - protein, 8 aa, synthetic construct
INPSSGGT

SEQ ID NO: 1419 - protein, 13 aa, synthetic construct
ARETIGGWNALDV

SEQ ID NO: 1420 - protein, 8 aa, synthetic construct
SSTIGRHS

SEQ ID NO: 1421 - skipped

SEQ ID NO: 1422 - protein, 11 aa, synthetic construct
AAWDDSLSGVL

SEQ ID NO: 1423 - protein, 8 aa, synthetic construct
GYTFTDHY

SEQ ID NO: 1424 - protein, 7 aa, synthetic construct
INPSSGG

SEQ ID NO: 1425 - protein, 13 aa, synthetic construct
ARETIGGWNALDV

SEQ ID NO: 1426 - protein, 6 aa, synthetic construct
KIGTKS

SEQ ID NO: 1427 - skipped

SEQ ID NO: 1428 - protein, 11 aa, synthetic construct
QVWDSNSDHVV

SEQ ID NO: 1429 - protein, 8 aa, synthetic construct
GYTFTGYY

SEQ ID NO: 1430 - protein, 8 aa, synthetic construct
INPNSGGT

SEQ ID NO: 1431 - protein, 13 aa, synthetic construct
VREVKDYYYYMDV

SEQ ID NO: 1432 - protein, 8 aa, synthetic construct
SGSIASNS

SEQ ID NO: 1433 - skipped

SEQ ID NO: 1434 - protein, 10 aa, synthetic construct
QSYDDSEQVV

SEQ ID NO: 1435 - protein, 8 aa, synthetic construct
GYTFTGYY

SEQ ID NO: 1436 - protein, 8 aa, synthetic construct
VNPHSGGT

SEQ ID NO: 1437 - protein, 14 aa, synthetic construct
ARETDISANYHFDY

SEQ ID NO: 1438 - protein, 9 aa, synthetic construct
SSDVGSYNA

SEQ ID NO: 1439 - skipped

SEQ ID NO: 1440 - protein, 11 aa, synthetic construct
ATWDDSLKGPV

SEQ ID NO: 1441 - protein, 8 aa, synthetic construct
GYTFTGYY

SEQ ID NO: 1442 - protein, 8 aa, synthetic construct
INPKTGDT

SEQ ID NO: 1443 - protein, 13 aa, synthetic construct
AREGLSTSSPLDY

SEQ ID NO: 1444 - protein, 6 aa, synthetic construct
ELATNI

SEQ ID NO: 1445 - skipped

SEQ ID NO: 1446 - protein, 11 aa, synthetic construct
QLWDSASDQVV

SEQ ID NO: 1447 - protein, 8 aa, synthetic construct
GYTFTSHY

SEQ ID NO: 1448 - protein, 8 aa, synthetic construct
INTGNGDT

SEQ ID NO: 1449 - protein, 14 aa, synthetic construct
ARESSSSWFVAFDV

SEQ ID NO: 1450 - protein, 6 aa, synthetic construct
NIRSKR

SEQ ID NO: 1451 - skipped

SEQ ID NO: 1452 - protein, 11 aa, synthetic construct
QVWDPITDQVV

SEQ ID NO: 1453 - protein, 8 aa, synthetic construct
GYTFTGYY

SEQ ID NO: 1454 - protein, 8 aa, synthetic construct
INPHSGGT

SEQ ID NO: 1455 - protein, 17 aa, synthetic construct
AREIVVVTAPAAAAMDV

SEQ ID NO: 1456 - protein, 9 aa, synthetic construct
SSDVAIYDR

SEQ ID NO: 1457 - skipped

SEQ ID NO: 1458 - protein, 10 aa, synthetic construct
SSYTTSGTFV

SEQ ID NO: 1459 - protein, 8 aa, synthetic construct
GYTFTGYY

SEQ ID NO: 1460 - protein, 8 aa, synthetic construct
INPNSGGT

SEQ ID NO: 1461 - protein, 15 aa, synthetic construct
AREGSGDLDSLYMDV

SEQ ID NO: 1462 - protein, 6 aa, synthetic construct
NIGSKS

SEQ ID NO: 1463 - skipped

SEQ ID NO: 1464 - protein, 10 aa, synthetic construct
QLWDGGSDVV

SEQ ID NO: 1465 - protein, 8 aa, synthetic construct
GYTFTDHY

SEQ ID NO: 1466 - protein, 8 aa, synthetic construct
INPSSGGT

SEQ ID NO: 1467 - protein, 13 aa, synthetic construct
ARETIGGWNALDV

SEQ ID NO: 1468 - protein, 8 aa, synthetic construct
SSNIGINT

SEQ ID NO: 1469 - skipped

SEQ ID NO: 1470 - protein, 11 aa, synthetic construct
AAWDDTLNGPL

SEQ ID NO: 1471 - DNA, 390 bp, synthetic construct
  source 1..390: mol_type = other DNA
caggtgcagctgttggagtctgggggaggcgtggtccagcctgggaggtccctgagactctcctgtgcagcctctggattcaccttcagtaactatggcatgcactgggtccgccaggctccaggcaaggggctggagtgggtggcaattatatcatttgatggaagtaaaaaatattatgcaaactccgtgaagggccgatccaccatctccagagacaattccaagaacacgctgtctctgcaaatgaacagcctgggacctgaggacacggctctatattactgtgcgaaactgccctccccgtattactttgatagtcggttcgtgtgggtcgccgccagcgcatttcacttctggggccagggaatcctggtcaccgtctcttca

SEQ ID NO: 1472 - protein, 130 aa, synthetic construct
QVQLLESGGGVVQPGRSLRLSCAASGFTFSNYGMHWVRQAPGKGLEWVAIISFDGSKKYYANSVKGRSTISRDNSKNTLSLQMNSLGPEDTALYYCAKLPSPYYFDSRFVWVAASAFHFWGQGILVTVSS

SEQ ID NO: 1473 - protein, 110 aa, synthetic construct
NFMLTQPPSASGTPGQRVTISCSGSSSNIGGNTVHWFQQLPGTAPKLLIYTNSLRPSGVPDRFSGSKSGTSASLAISGLQSEDEADYYCAAWDDSLNGQVFGGGTKLTVL

SEQ ID NO: 1474 - DNA, 330 bp, synthetic construct
  source 1..330: mol_type = other DNA
aattttatgctgactcagccaccctcagcgtctgggacccccgggcagagggtcaccatctcttgctctggaagcagctccaacatcggaggtaatactgtacactggttccagcagctcccaggaacggcccccaaactcctcatctatactaatagtctgcggccctcaggggtccctgaccgattctctggctccaagtctggcacctcagcctccctggccatcagtgggctccagtctgaggatgaggctgattattactgtgcagcatgggataacagcctaaatggtcaggtgttcggcggagggaccaagctgaccgtccta

SEQ ID NO: 1475 - protein, 110 aa, synthetic construct
NFMLTQPPSASGTPGQRVTISCSGSSSNIGGNTVHWFQQLPGTAPKLLIYTNSLRPSGVPDRFSGSKSGTSASLAISGLQSEDEADYYCAAWDNSLNGQVFGGGTKLTVL

SEQ ID NO: 1476 - protein, 8 aa, synthetic construct
GFTFSNYG

SEQ ID NO: 1477 - protein, 8 aa, synthetic construct
ISFDGSKK

SEQ ID NO: 1478 - protein, 25 aa, synthetic construct
CAKLPSPYYFDSRFVWVAASAFHFW

SEQ ID NO: 1479 - protein, 8 aa, synthetic construct
SSNIGGNT

SEQ ID NO: 1480 - skipped

SEQ ID NO: 1481 - protein, 13 aa, synthetic construct [sequence omitted]

SEQ ID NO: 1482 - protein, 13 aa, synthetic construct
CAAWDNSLNGQVF

SEQ ID NO: 1483 - protein, 7 aa, synthetic construct
GNTNRPS

SEQ ID NO: 1484 - protein, 5 aa, synthetic construct
GGGGS

SEQ ID NO: 1485 - DNA, 372 bp, synthetic construct
  source 1..372: mol_type = other DNA; note = variable heavy chain of Ab-14
caggtgcagctggtgcagtctggagctgaggtgaagaagcctggggcctcagtgaaggtctcctgcaaggcttctggttacacctttaccagctatggtatcagctgggtgcgacaggcccctggacaagggcttgagtggatgggatggatcagcgcttacaatggtaacacaaactatgcacagaagctccagggcagagtcaccatgaccacagacacatccacgagcacagcctacatggagctgaggagcctgagatctgacgacacggccgtgtattactgtgcgagagctctacctagtgggactatactggtcggaggttggttcgacccctggggccagggaaccctggtcaccgtctcctca

SEQ ID NO: 1486 - protein, 124 aa, synthetic construct
  source 1..124: note = variable heavy chain of Ab-14
QVQLVQSGAEVKKPGASVKVSCKASGYTFTSYGISWVRQAPGQGLEWMGWISAYNGNTNYAQKLQGRVTMTTDTSTSTAYMELRSLRSDDTAVYYCARALPSGTILVGGWFDPWGQGTLVTVSS

SEQ ID NO: 1487 - DNA, 333 bp, synthetic construct
  source 1..333: mol_type = other DNA; note = variable heavy chain of Ab-14
aattttatgctgactcagccccactctgtgtcggagtctccggggaagacggtaaccatctcctgcacccgcagcagtggcaacattgccagcaattatgtgcagtggtaccaacagcgcccgggcagtgcccccaccactgtgatctatgaggataaccaaagaccctctggggtccctgatcggttctctggctccatcgacagctcctccaactctgcctccctcaccatctctggactgaagactgaggacgaggctgactactactgtcagtcttatgatagcagcaatctttgggtgttcggcggagggaccaagctgaccgtccta

SEQ ID NO: 1488 - protein, 111 aa, synthetic construct
  source 1..111: note = variable heavy chain of Ab-14
NFMLTQPHSVSESPGKTVTISCTRSSGNIASNYVQWYQQRPGSAPTTVIYEDNQRPSGVPDRFSGSIDSSSNSASLTISGLKTEDEADYYCQSYDSSNLWVFGGGTKLTVL

SEQ ID NO: 1489 - DNA, 372 bp, synthetic construct
  source 1..372: mol_type = other DNA; note = variable heavy chain of Ab-16
gaggtgcagctggtgcagtctgggggaggcgtggtccagcctgggaggtccctgagactctcctgtgcagcctctggattcacctttagcagctatgccctgagctgggtccgccaggctccagggaaggggctggagtgggtctcagctattagtggtggtggtggtagcacatactacgcagactccgtgaagggccggttcaccatctccagagacaattccaagaacacgctgtatctgcaaatgaacagcctgagagccgaggacacggccgtatattactgtgcgaaagacgtgtttccagagactttttcgatgaactacggtatggacgtctggggccaaggaaccctggtcaccgtctcctca

SEQ ID NO: 1490 - protein, 124 aa, synthetic construct
  source 1..124: note = variable heavy chain of Ab-16
EVQLVQSGGGVVQPGRSLRLSCAASGFTFSSYALSWVRQAPGKGLEWVSAISGGGGSTYYADSVKGRFTISRDNSKNTLYLQMNSLRAEDTAVYYCAKDVFPETFSMNYGMDVWGQGTLVTVSS

SEQ ID NO: 1491 - DNA, 324 bp, synthetic construct
  source 1..324: mol_type = other DNA; note = variable heavy chain of Ab-16
tcttctgagctgactcaggaccctgctgtgtctgtggccttgggacagacagtcaggatcacatgccaaggagacagcctcagaagctattatgcaagctggtaccagcagaagccaggacaggcccctgtacttgtcatctatggtaaaaacaaccggccctcagggatcccagaccgattctctggctccagctcaggaaacacagcttccttgaccatcactggggctcaggcggaagatgaggctgactattactgtaactcccgggacagcagtggtaaccattatgtcttcggaactgggaccaaggtcaccgtccta

SEQ ID NO: 1492 - protein, 108 aa, synthetic construct
  source 1..108: note = variable heavy chain of Ab-16
SSELTQDPAVSVALGQTVRITCQGDSLRSYYASWYQQKPGQAPVLVIYGKNNRPSGIPDRFSGSSSGNTASLTITGAQAEDEADYYCNSRDSSGNHYVFGTGTKVTVL

SEQ ID NO: 1493 - DNA, 384 bp, synthetic construct
  source 1..384: mol_type = other DNA; note = variable heavy chain of Ab-22
caggtgcagctggtgcagtctgggggaggcgtggtacagcctggggggtccctgagactctcctgtgcagcctctggattcacctttgatgattatgccatgcactgggtccgtcaagctccagggaagggtctggagtgggtctctcttattagtggggatggtggtagcacatactatgcagactctgtgaagggccgattcaccatctccagagacaacagcaaaaactccctgtatctgcaaatgaacagtctgagaactgaggacaccgccttgtattactgtgcaaaagtgctcctcccctgtagtagtaccagctgctatggaagcgtcggtgcttttgatatctggggccaagggaccacggtcaccgtctcctca

SEQ ID NO: 1494 - protein, 128 aa, synthetic construct
  source 1..128: note = variable heavy chain of Ab-22
QVQLVQSGGGVVQPGGSLRLSCAASGFTFDDYAMHWVRQAPGKGLEWVSLISGDGGSTYYADSVKGRFTISRDNSKNSLYLQMNSLRTEDTALYYCAKVLLPCSSTSCYGSVGAFDIWGQGTTVTVSS

SEQ ID NO: 1495 - DNA, 324 bp, synthetic construct
  source 1..324: mol_type = other DNA; note = variable heavy chain of Ab-22
taggacgatgagctcggtcccagctccgaagacataatgatcactattattatcccacacctgacagtaataatcggcctcatcaccggcttcgaccctgctgatggtcagggtggccgtgttcccagagttggagccagagaatcgctcagagatccctgagggccggtccctatcagagtagatgaccaacgcaggggcctggcctggcttctgctggtaccagtgcacactcttccttccaatgtcgcttcccccacaggtaatcctggccgtctttcctggggccactgacactgagggtgcctgagtcagcacaggcag

SEQ ID NO: 1496 - protein, 108 aa, synthetic construct
  source 1..108: note = variable heavy chain of Ab-22
LPVLTQAPSVSVAPGKTARITCGGSDIGRKSVHWYQQKPGQAPALVIYSDRDRPSGISERFSGSNSGNTATLTISRVEAGDEADYYCQVWDNNSDHYVFGAGTELIVL

SEQ ID NO: 1497 - DNA, 351 bp, synthetic construct
  source 1..351: mol_type = other DNA; note = variable heavy chain of Ab-30
caggtgcagctggtgcagtctgggggaagtgtggtacggcctggggaatccctcagactctcctgtgtagcctctggattcatctttgataattatgacatgagttgggtccgccaagttccagggaaggggctggagtgggtctctcgtgttaattggaatggtggtagcacaacttatgcagacgctgtgaagggccgattcaccatctccagagacaacaccaagaactccctgtatctacaaatgaacaacctgagagccgaagacacggccgtgtattactgtgtgcgcgagtttgtcggtgcttatgatctctggggccaggggaccacggtcaccgtctcctca

SEQ ID NO: 1498 - protein, 117 aa, synthetic construct
  source 1..117: note = variable heavy chain of Ab-30
QVQLVQSGGSVVRPGESLRLSCVASGFIFDNYDMSWVRQVPGKGLEWVSRVNWNGGSTTYADAVKGRFTISRDNTKNSLYLQMNNLRAEDTAVYYCVREFVGAYDLWGQGTTVTVSS

SEQ ID NO: 1499 - DNA, 327 bp, synthetic construct
  source 1..327: mol_type = other DNA; note = variable heavy chain of Ab-30
cagtctgccctgactcagcctgcctccgtgtctgggtctcctggacagtcgatcaccatctcctgcactggaaccagcagtgacgttggtggttataactatgtctcctggtaccaacaacacccaggcaaagcccccaaactcatgatttatgatgtcagtaatcggccctcaggggtttctaatcgcttctctggctccaagtctggcaacacggcctccctgaccatctctgggctccaggctgaggacgaggctgattattactgcagctcatatacaagcagcactctgccgttcggcggagggaccaagctgaccgtccta

SEQ ID NO: 1500 - protein, 109 aa, synthetic construct
  source 1..109: note = variable heavy chain of Ab-30
QSALTQPASVSGSPGQSITISCTGTSSDVGGYNYVSWYQQHPGKAPKLMIYDVSNRPSGVSNRFSGSKSGNTASLTISGLQAEDEADYYCSSYTSSTLPFGGGTKLTVL

SEQ ID NO: 1501 - DNA, 363 bp, synthetic construct
  source 1..363: mol_type = other DNA; note = variable heavy chain of Ab-31
caggtgcagctggtgcagtctggggctgaggtgaagaagccaggggccacagtgaaggtctcctgcaaggtttttggagacaccttccgcggcctctatatacactgggtgcgacaggcccctggacaagggcttgagtggatgggagggatcatccctatctttggtacagcaaactacgcacagaagttccagggcagagtcacgattaccacggacgaatccacgagcacagcctacatggagctgagcagcctgagatctgaggacacggccgtgtattactgtgcgagcggactacgttgggggatctggggctggttcgacccctggggccagggcaccctggtcaccgtctcctca

SEQ ID NO: 1502 - protein, 121 aa, synthetic construct
  source 1..121: note = variable heavy chain of Ab-31
QVQLVQSGAEVKKPGATVKVSCKVFGDTFRGLYIHWVRQAPGQGLEWMGGIIPIFGTANYAQKFQGRVTITTDESTSTAYMELSSLRSEDTAVYYCASGLRWGIWGWFDPWGQGTLVTVSS

SEQ ID NO: 1503 - DNA, 321 bp, synthetic construct
  source 1..321: mol_type = other DNA; note = variable heavy chain of Ab-31
gaaattgtgttgacgcagtctccagccaccctgtctttgtctccaggggaaagagccaccctctcctgcagggccagtcagagtattggcaacagcttagcctggtaccagcagaaacctggccaggctcccaggctcctcatgtatggtgcatccagcagggccactggcatcccagacaggttcagtggcagtggggctgggacagacttcactctcaccatcagcagcctagagcctgaagattttgcaacgtattactgtcagcagcatactatcccaacattctctttcggccctgggaccaaagtggaagtcaaa

SEQ ID NO: 1504 - protein, 107 aa, synthetic construct
  source 1..107: note = variable heavy chain of Ab-31
EIVLTQSPATLSLSPGERATLSCRASQSIGNSLAWYQQKPGQAPRLLMYGASSRATGIPDRFSGSGAGTDFTLTISSLEPEDFATYYCQQHTIPTFSFGPGTKVEVK

SEQ ID NO: 1505 - DNA, 363 bp, synthetic construct
  source 1..363: mol_type = other DNA; note = variable heavy chain of Ab-32
gaggtgcagctggtgcagtctggggctgagctgaagaagcctgggtcctcggtgaaggtctcctgcaaggcttttggaggcaccttcagtgacaatgctatcagctgggtgcgacaggcccctggacaagggcctgagtggatggggggcatcattcctatctttggaaaaccaaactacgcacagaagttccagggcagagtcacgattaccgcggacgaatccacgagcactgcctacatggtcctgagcagcctgagatctgaggacacggccgtatattactgtgcgagaactatggttcggggctttcttggggttatggacgtctggggccaagggaccacggtcaccgtctcctca

SEQ ID NO: 1506 - protein, 121 aa, synthetic construct
  source 1..121: note = variable heavy chain of Ab-32
EVQLVQSGAELKKPGSSVKVSCKAFGGTFSDNAISWVRQAPGQGPEWMGGIIPIFGKPNYAQKFQGRVTITADESTSTAYMVLSSLRSEDTAVYYCARTMVRGFLGVMDVWGQGTTVTVSS

SEQ ID NO: 1507 - DNA, 321 bp, synthetic construct
  source 1..321: mol_type = other DNA; note = variable heavy chain of Ab-32
gatattgtgatgacccagactccatccttcctgtccgcatccataggagacagagtcaccatcacttgccgggccagtcagggcattggcagttatttagcctggtatcagcaaagaccaggggaagcccctaagctcctgatctatgctgcatcgactttgcaaagtggagtcccatcaaggttcagcggcagtggatctgggacggacttcactctcacaatcagcaacctgcagcctgaagattttgcaacttattactgtcaacagcttaataattacccgatcaccttcggccaagggacacgactggagattaaa

SEQ ID NO: 1508 - protein, 107 aa, synthetic construct
  source 1..107: note = variable heavy chain of Ab-32
DIVMTQTPSFLSASIGDRVTITCRASQGIGSYLAWYQQRPGEAPKLLIYAASTLQSGVPSRFSGSGSGTDFTLTISNLQPEDFATYYCQQLNNYPITFGQGTRLEIK

SEQ ID NO: 1509 - DNA, 375 bp, synthetic construct
  source 1..375: mol_type = other DNA; note = variable heavy chain of Ab-38
caggtgcagctggtgcagtctgggggaggcttggtacagcctggggggtccctgagactctcctgtgcagcctctggattcacctttagcagctatgccatgagctgggtccgccaggctccagggaaggggctggagtgggtctcagctattagtggtagtggtggtagcacatactacgcagactccgtgaagggccggttcaccatctccagagacaattccaagaacacgctgtatctgcaaatgaacagcctgagagccgaggacacggccgtatattactgtgcgaaagatcagttcgttacgatttttggagtgccaagatacggtatggacgtctggggccaagggaccacggtcaccgtctcctca

SEQ ID NO: 1510 - protein, 125 aa, synthetic construct
  source 1..125: note = variable heavy chain of Ab-38
QVQLVQSGGGLVQPGGSLRLSCAASGFTFSSYAMSWVRQAPGKGLEWVSAISGSGGSTYYADSVKGRFTISRDNSKNTLYLQMNSLRAEDTAVYYCAKDQFVTIFGVPRYGMDVWGQGTTVTVSS

SEQ ID NO: 1511 - DNA, 315 bp, synthetic construct
  source 1..315: mol_type = other DNA; note = variable heavy chain of Ab-38
cagtctgccctgactcagccaccctcagtgtccgtgtccccaggacagacagccaacatcccctgctctggagataaattggggaataaatatgcttactggtatcagcagaagccaggccagtcccctgtactgctcatctatcaagatatcaagcggccctcaaggatccctgagcgattctctggctccaactctgcggacacagccactctgaccatcagcgggacccaggctatggatgaggctgactattactgtcagacgtgggacaacagcgtggtcttcggcggcgggaccaagctgaccgtcctc

SEQ ID NO: 1512 - protein, 105 aa, synthetic construct
  source 1..105: note = variable heavy chain of Ab-38
QSALTQPPSVSVSPGQTANIPCSGDKLGNKYAYWYQQKPGQSPVLLIYQDIKRPSRIPERFSGSNSADTATLTISGTQAMDEADYYCQTWDNSVVFGGGTKLTVL

SEQ ID NO: 1513 - DNA, 360 bp, synthetic construct
  source 1..360: mol_type = other DNA; note = variable heavy chain of Ab-42
caggtgcagctggtgcagtctggggctgaggtgaagaagcctgggtcctcggtgaaggtctcctgcaaggcttctggaggcaccttcagcagctatgctatcagctgggtgcgacaggcccctggacaagggcttgagtggatgggagggatcatccctatctttggtacagcaaactacgcacagaagttccagggcagagtcacgattaccgcggacaaatccacgagcacagcctacatggagctgagcagcctgagatctgaggacacggccgtctattactgtgcgagagggcgtcaaatgttcggtgcgggaattgatttctggggcccgggcaccctggtcaccgtctcctca

SEQ ID NO: 1514 - protein, 120 aa, synthetic construct
  source 1..120: note = variable heavy chain of Ab-42
QVQLVQSGAEVKKPGSSVKVSCKASGGTFSSYAISWVRQAPGQGLEWMGGIIPIFGTANYAQKFQGRVTITADKSTSTAYMELSSLRSEDTAVYYCARGRQMFGAGIDFWGPGTLVTVSS

SEQ ID NO: 1515 - DNA, 336 bp, synthetic construct
  source 1..336: mol_type = other DNA; note = variable heavy chain of Ab-42
aattttatgctgactcagccccactctgtgtcggagtctccggggaagacggtaaccatctcctgcacccgcagcagtggcagcattgacagcaactatgtgcagtggtaccagcagcgcccgggcagcgcccccaccactgtgatctatgaggataaccaaagaccctctggggtccctgatcggttctctggctccatcgacagctcctccaactctgcctccctcaccatctctggactgaagactgaggacgaggctgactactactgtcagtcttatgatagcaacaatcgtcatgtgatattcggcggagggaccaagctgaccgtccta

SEQ ID NO: 1516 - protein, 112 aa, synthetic construct
  source 1..112: note = variable heavy chain of Ab-42
NFMLTQPHSVSESPGKTVTISCTRSSGSIDSNYVQWYQQRPGSAPTTVIYEDNQRPSGVPDRFSGSIDSSSNSASLTISGLKTEDEADYYCQSYDSNNRHVIFGGGTKLTVL

SEQ ID NO: 1517 - DNA, 354 bp, synthetic construct
  source 1..354: mol_type = other DNA; note = variable heavy chain of Ab-46
gaggtgcagctggtggagtctggggctgaagtaaagaagcctgggtcctcggtgaaagtctcctgcaaggtttcaggaggcacattcggcacctatgctctcaactgggtgcgccaggcccctggacaagggcttgagtggatgggaaggatcgtccctctcattggtctagtaaactacgcacataactttgagggcagaatctcgattaccgcggacaagtccacgggcacagcctacatggaactgagcaacctgagatctgacgacacggccgtgtattactgtgcgagagaggtctacggtggtaactccgactactggggccagggaaccctggtcaccgtctcctca

SEQ ID NO: 1518 - protein, 118 aa, synthetic construct
  source 1..118: note = variable heavy chain of Ab-46
EVQLVESGAEVKKPGSSVKVSCKVSGGTFGTYALNWVRQAPGQGLEWMGRIVPLIGLVNYAHNFEGRISITADKSTGTAYMELSNLRSDDTAVYYCAREVYGGNSDYWGQGTLVTVSS

SEQ ID NO: 1519 - DNA, 330 bp, synthetic construct
  source 1..330: mol_type = other DNA; note = variable heavy chain of Ab-46
aattttatgctgactcagccccactcagtgtcggagtctccggggaagacggtaaccatctcctgcactcgcagtagtggcaacattggcaccaactatgtgcagtggtaccagcagcgcccgggcagtgcccccgtcgctttgatctacgaggattatcgaagaccctctggggtccctgatcggttctctggctccatcgacagctcctccaactctgcctccctcatcatctctggactgaagcctgaggacgaggctgactactactgtcagtcttatcatagcagcggttgggaattcggcggagggaccaagctgaccgtcctc

SEQ ID NO: 1520 - protein, 110 aa, synthetic construct
  source 1..110: note = variable heavy chain of Ab-46
NFMLTQPHSVSESPGKTVTISCTRSSGNIGTNYVQWYQQRPGSAPVALIYEDYRRPSGVPDRFSGSIDSSSNSASLIISGLKPEDEADYYCQSYHSSGWEFGGGTKLTVL

SEQ ID NO: 1521 - DNA, 360 bp, synthetic construct
  source 1..360: mol_type = other DNA; note = variable heavy chain of Ab-50
caggtgcagctggtgcagtctggaggtgaggtgaagaagccgggggcctcagtgaaggtctcctgcaaggcttctggttacaccttgagcagtcatggtataacctgggtgcgacaggcccctggacaagggcttgagtggatgggatggatcagcgctcacaatggtcacgctagcaatgcacagaaggtggaggacagagtcactatgactactgacacatccacgaacacagcctacatggaactgaggagcctgacagctgacgacacggccgtgtattactgtgcgagagtacatgctgccctctactatggtatggacgtctggggccaaggaaccctggtcaccgtctcctca

SEQ ID NO: 1522 - protein, 120 aa, synthetic construct
  source 1..120: note = variable heavy chain of Ab-50
QVQLVQSGGEVKKPGASVKVSCKASGYTLSSHGITWVRQAPGQGLEWMGWISAHNGHASNAQKVEDRVTMTTDTSTNTAYMELRSLTADDTAVYYCARVHAALYYGMDVWGQGTLVTVSS

SEQ ID NO: 1523 - DNA, 324 bp, synthetic construct
  source 1..324: mol_type = other DNA; note = variable heavy chain of Ab-50
cagtctgtgctgactcagccaccctcggtgtcagtggccccaggacagacggccaggattacctgtgggggaaacaacattggaagtaaaggtgtgcactggtatcagcagaagccaggccaggcccctgtactggtcgtctatgatgatagtgaccggccctcagggatccctgagcgattctctggctccaactctgggaacacggccaccctgaccatcagcagggtcgaagccggggatgaggccgactattactgtcaggtgtgggatagtagtagtgatcattgggtgttcggcggagggaccaagctgaccgtccta

SEQ ID NO: 1524 - protein, 108 aa, synthetic construct
  source 1..108: note = variable heavy chain of Ab-50
QSVLTQPPSVSVAPGQTARITCGGNNIGSKGVHWYQQKPGQAPVLVVYDDSDRPSGIPERFSGSNSGNTATLTISRVEAGDEADYYCQVWDSSSDHWVFGGGTKLTVL

SEQ ID NO: 1525 - DNA, 363 bp, synthetic construct
  source 1..363: mol_type = other DNA; note = variable heavy chain of Ab-52
caggtgcagctgcaggagtcggggggaggcgtggtgcagcctgggaggtccctgagactctcctgttcagcctctggattcaccttcagcagacatggcatgcactgggtccgccaggctccaggcaaggggctggagtgggtggcagtgatatcacatgatggaagtgtaaaatactatgcagactccatgaagggccgattcagcatctccagagacaattccaacaacacactgtatctccaaatggacagcctgagagctgacgacacggccgtttattactgtgcgagaggactgtcgtaccaggtgtcggggtggttcgacccctggggccagggcaccctggtcaccgtctcctca

SEQ ID NO: 1526 - protein, 121 aa, synthetic construct
  source 1..121: note = variable heavy chain of Ab-52
QVQLQESGGGVVQPGRSLRLSCSASGFTFSRHGMHWVRQAPGKGLEWVAVISHDGSVKYYADSMKGRFSISRDNSNNTLYLQMDSLRADDTAVYYCARGLSYQVSGWFDPWGQGTLVTVSS

SEQ ID NO: 1527 - DNA, 333 bp, synthetic construct
  source 1..333: mol_type = other DNA; note = variable heavy chain of Ab-52
aattttatgctgactcagccccactctgtgtcggagtctccggggaagacggtaaccatctcctgcacccgcagcagtggcagcattgccagcaactatgtgcagtggtaccagcagcgcccgggcagtgcccccaccactgtgatctatgaggataaccaaagaccctctggggtccctgatcggttctctggctccatcgacagctcctccaactctgcctccctcaccatctctggactgaagactgaggacgaggctgactactactgtcagtcttatgatagcaccaccccttcggtgttcggcggcgggaccaagctgaccgtccta

SEQ ID NO: 1528 - protein, 111 aa, synthetic construct
  source 1..111: note = variable heavy chain of Ab-52
NFMLTQPHSVSESPGKTVTISCTRSSGSIASNYVQWYQQRPGSAPTTVIYEDNQRPSGVPDRFSGSIDSSSNSASLTISGLKTEDEADYYCQSYDSTTPSVFGGGTKLTVL

SEQ ID NO: 1529 - DNA, 360 bp, synthetic construct
  source 1..360: mol_type = other DNA; note = variable heavy chain of Ab-55
caggtgcagctggtgcagtctggagctgaggtgaagaagcctggggcctcagtgaaggtctcctgcaaggcttctggttacacctttaccagctatggtatcagctgggtgcgacaggcccctggacaagggcttgagtggatgggatggaccagccctcataatggtctcacagcatttgcacagatcctagagggccgagtcaccatgaccacagacacatccacgaacacagcctacatggaattgaggaacctgacatttgatgacacggccgtttatttctgtgcgaaagtacatcctgtcttctcttatgcgttggacgtctggggccaaggcaccctggtcaccgtctcctca

SEQ ID NO: 1530 - protein, 120 aa, synthetic construct
  source 1..120: note = variable heavy chain of Ab-55
QVQLVQSGAEVKKPGASVKVSCKASGYTFTSYGISWVRQAPGQGLEWMGWTSPHNGLTAFAQILEGRVTMTTDTSTNTAYMELRNLTFDDTAVYFCAKVHPVFSYALDVWGQGTLVTVSS

SEQ ID NO: 1531 - DNA, 330 bp, synthetic construct
  source 1..330: mol_type = other DNA; note = variable heavy chain of Ab-55
aattttatgctgactcagccccactctgtgtcggagtccccggggaagacggtaaccatctcctgcacccgcagcagtggcagcattgccagcaactatgtacagtggtaccagcagcgcccgggcagttcccccaccactgtgatctatgaagataaccaaagaccctctggggtccctgatcggttctctggctccatcgacacctcctccaactctgcctccctcaccatctctggactgaagactaaggacgaggcggactactactgtcagtcttatgatggcatcactgtgattttcggcggagggaccaagttgaccgtccta

SEQ ID NO: 1532 - protein, 110 aa, synthetic construct
  source 1..110: note = variable heavy chain of Ab-55
NFMLTQPHSVSESPGKTVTISCTRSSGSIASNYVQWYQQRPGSSPTTVIYEDNQRPSGVPDRFSGSIDTSSNSASLTISGLKTKDEADYYCQSYDGITVIFGGGTKLTVL

SEQ ID NO: 1533 - DNA, 354 bp, synthetic construct
  source 1..354: mol_type = other DNA; note = variable heavy chain of Ab-56
gaggtgcagctggtggagtctggagctgaggtgatgaaccctgggtcctcggtgagggtctcctgcaggggttctggaggcgacttcagtacctatgctttcagctgggtgcgacaggcccctggacaagggcttgagtggatgggaaggatcatccctatccttggtatagcaaactacgcacagaagttccagggcagggtcacgattaccgcggacaaatccacgagcacagcctacatggagctgagcagcctgagatctgacgatacggccgtgtattactgtgcgagagatggctatggttcggacccggtgctatggggccagggcaccctggtcaccgtctcctca

SEQ ID NO: 1534 - protein, 118 aa, synthetic construct
  source 1..118: note = variable heavy chain of Ab-56
EVQLVESGAEVMNPGSSVRVSCRGSGGDFSTYAFSWVRQAPGQGLEWMGRIIPILGIANYAQKFQGRVTITADKSTSTAYMELSSLRSDDTAVYYCARDGYGSDPVLWGQGTLVTVSS

SEQ ID NO: 1535 - DNA, 333 bp, synthetic construct
  source 1..333: mol_type = other DNA; note = variable heavy chain of Ab-56
aattttatgctgactcagccccactctgtgtcggggtctccggggaagacggtaaccctcccctgcacccgcagcagtggcagcattgccagccactatgtccagtggtaccagcagcgcccgggcagtgcccccaccactgtgatctatgaggataacaagagaccctctggggtccctgatcggttctctggctccatcgacagctcctccaactctgcctccctcagcatctctggactgaagactgaggacgaggctgactactactgtcagtcttatgatagcagcaatcgttgggtgttcggcggagggaccaagctgaccgtccta

SEQ ID NO: 1536 - protein, 111 aa, synthetic construct
  source 1..111: note = variable heavy chain of Ab-56
NFMLTQPHSVSGSPGKTVTLPCTRSSGSIASHYVQWYQQRPGSAPTTVIYEDNKRPSGVPDRFSGSIDSSSNSASLSISGLKTEDEADYYCQSYDSSNRWVFGGGTKLTVL

SEQ ID NO: 1537 - DNA, 354 bp, synthetic construct
  source 1..354: mol_type = other DNA; note = variable heavy chain of Ab-65
gaggtgcagctggtgcagtctggagctgaggtgaagaagcctggggcctcagtgaaggtctcctgcaaggcttctggttacacctttaccaactatggtatcagctgggtgcgacaggcccctggacaagggcttgagtggatgggatggatcagcgcttacaatggtaacacaaactatgcacagaaggtccagggcagagtcaccatgaccacagacacatccacgagcacaggctacatggagctgaggagcctgagatctgacgacacggccgtgtattactgtgcgagaggagattttcggaaaccctttgactactggggccagggaaccctggtcaccgtctcctca

SEQ ID NO: 1538 - protein, 118 aa, synthetic construct
  source 1..118: note = variable heavy chain of Ab-65
EVQLVQSGAEVKKPGASVKVSCKASGYTFTNYGISWVRQAPGQGLEWMGWISAYNGNTNYAQKVQGRVTMTTDTSTSTGYMELRSLRSDDTAVYYCARGDFRKPFDYWGQGTLVTVSS

SEQ ID NO: 1539 - DNA, 345 bp, synthetic construct
  source 1..345: mol_type = other DNA; note = variable heavy chain of Ab-65
ctgcctgtgctgactcagccggcttccctctctgcatcccccggagcatcagccagtctcacctgcaccttacgcagtggcctcaatgttggttcctacaggatatactggtaccagcagaagccagggagtcgtccccagtatctcctgaactacaaatcagactcaaataaacagcaggcctctggagtccccagccgcttctctggatccaaggatgcttcggccaatgcagggattttactcatctccgggctccagtctgaggatgaggctgactattactgtatgatttggtacagcagcgctgtggtattcggcggagggaccaagctgaccgtccta

SEQ ID NO: 1540 - protein, 115 aa, synthetic construct
  source 1..115: note = variable heavy chain of Ab-65
LPVLTQPASLSASPGASASLTCTLRSGLNVGSYRIYWYQQKPGSRPQYLLNYKSDSNKQQASGVPSRFSGSKDASANAGILLISGLQSEDEADYYCMIWYSSAVVFGGGTKLTVL

SEQ ID NO: 1541 - protein, 5 aa, synthetic construct
  source 1..5: note = Heavy chain CDR1 consensus, Ab-42
SYAIS

SEQ ID NO: 1542 - protein, 5 aa, synthetic construct
  source 1..5: note = Heavy chain CDR1 of Ab-14, Ab-55
SYGIS

SEQ ID NO: 1543 - protein, 5 aa, synthetic construct
  source 1..5: note = Heavy chain CDR1 of Ab-16
SYALS

SEQ ID NO: 1544 - protein, 5 aa, synthetic construct
  source 1..5: note = Heavy chain CDR1 of Ab-22
DYAMH

SEQ ID NO: 1545 - protein, 5 aa, synthetic construct
  source 1..5: note = Heavy chain CDR1 of Ab-30
NYDMS

SEQ ID NO: 1546 - protein, 5 aa, synthetic construct
  source 1..5: note = Heavy chain CDR1 of Ab-31
GLYIH

SEQ ID NO: 1547 - protein, 5 aa, synthetic construct
  source 1..5: note = Heavy chain CDR1 of Ab-32
DNAIS

SEQ ID NO: 1548 - protein, 5 aa, synthetic construct
  source 1..5: note = Heavy chain CDR1 of Ab-38
SYAMS

SEQ ID NO: 1549 - protein, 5 aa, synthetic construct
  source 1..5: note = Heavy chain CDR1 of Ab-46
TYALN

SEQ ID NO: 1550 - protein, 5 aa, synthetic construct
  source 1..5: note = Heavy chain CDR1 of Ab-50
SHGIT

SEQ ID NO: 1551 - protein, 5 aa, synthetic construct
  source 1..5: note = Heavy chain CDR1 of Ab-52
RHGMH

SEQ ID NO: 1552 - protein, 5 aa, synthetic construct
  source 1..5: note = Heavy chain CDR1 of Ab-56
TYAFS

SEQ ID NO: 1553 - protein, 5 aa, synthetic construct
  source 1..5: note = Heavy chain CDR1 of Ab-65
NYGIS

SEQ ID NO: 1554 - protein, 17 aa, synthetic construct
  source 1..17: note = Heavy chain CDR2 consensus
WISPIGGSTNYAQKVQG

SEQ ID NO: 1555 - protein, 17 aa, synthetic construct
  source 1..17: note = Heavy chain CDR2 of Ab-14
WISAYNGNTNYAQKLED

SEQ ID NO: 1556 - protein, 17 aa, synthetic construct
  source 1..17: note = Heavy chain CDR2 of Ab-16
AISGGGGSTYYADSVKD

SEQ ID NO: 1557 - protein, 17 aa, synthetic construct
  source 1..17: note = Heavy chain CDR2 of Ab-22
LISGDGGSTYYADSVKD

SEQ ID NO: 1558 - protein, 17 aa, synthetic construct
  source 1..17: note = Heavy chain CDR2 of Ab-30
RVNWNGGSTTYADAVKD

SEQ ID NO: 1559 - protein, 17 aa, synthetic construct
  source 1..17: note = Heavy chain CDR2 of Ab-31
WIIPIFGTANYAQKFED

SEQ ID NO: 1560 - protein, 17 aa, synthetic construct
  source 1..17: note = Heavy chain CDR2 of Ab-32
WIIPIFGKPNYAQKFED

SEQ ID NO: 1561 - protein, 17 aa, synthetic construct
  source 1..17: note = Heavy chain CDR2 of Ab-38
AISGSGGSTYYADSVKD

SEQ ID NO: 1562 - protein, 17 aa, synthetic construct
  source 1..17: note = Heavy chain CDR2 of Ab-42
WIIPIFGTANYAQKFED

SEQ ID NO: 1563 - protein, 17 aa, synthetic construct
  source 1..17: note = Heavy chain CDR2 of Ab-46
RIVPLIGLVNYAHNFED

SEQ ID NO: 1564 - protein, 17 aa, synthetic construct
  source 1..17: note = Heavy chain CDR2 of Ab-50
WISAHNGHASNAQKVED

SEQ ID NO: 1565 - protein, 17 aa, synthetic construct
  source 1..17: note = Heavy chain CDR2 of Ab-52
VISHDGSVKYYADSMKD

SEQ ID NO: 1566 - protein, 17 aa, synthetic construct
  source 1..17: note = Heavy chain CDR2 of Ab-55
WTSPHNGLTAFAQILED

SEQ ID NO: 1567 - protein, 17 aa, synthetic construct
  source 1..17: note = Heavy chain CDR2 of Ab-56
RIIPILGIANYAQKFED

SEQ ID NO: 1568 - protein, 17 aa, synthetic construct
  source 1..17: note = Heavy chain CDR2 of Ab-65
WISAYNGNTNYAQKVED

SEQ ID NO: 1569 - protein, 19 aa, synthetic construct
  source 1..19: note = Heavy chain CDR3 consensus
  VARIANT 3..17: note = Any naturally occurring amino acid
GLXXXXXXXXXXXXXXXDV

SEQ ID NO: 1570 - protein, 15 aa, synthetic construct
  source 1..15: note = Heavy chain CDR3 of Ab-14
ALPSGTILVGGWFDP

SEQ ID NO: 1571 - protein, 15 aa, synthetic construct
  source 1..15: note = Heavy chain CDR3 of Ab-16
DVFPETFSMNYGMDV

SEQ ID NO: 1572 - protein, 19 aa, synthetic construct
  source 1..19: note = Heavy chain CDR3 of Ab-22
VLLPCSSTSCYGSVGAFDI

SEQ ID NO: 1573 - protein, 8 aa, synthetic construct
  source 1..8: note = Heavy chain CDR3 of Ab-30
EFVGAYDL

SEQ ID NO: 1574 - protein, 12 aa, synthetic construct
  source 1..12: note = Heavy chain CDR3 of Ab-31
GLRWGIWGWFDP

SEQ ID NO: 1575 - protein, 12 aa, synthetic construct
  source 1..12: note = Heavy chain CDR3 of Ab-32
TMVRGFLGVMDV

SEQ ID NO: 1576 - protein, 16 aa, synthetic construct
  source 1..16: note = Heavy chain CDR3 of Ab-38
DQFVTIFGVPRYGMDV

SEQ ID NO: 1577 - protein, 11 aa, synthetic construct
  source 1..11: note = Heavy chain CDR3 of Ab-42
GRQMFGAGIDF

SEQ ID NO: 1578 - protein, 9 aa, synthetic construct
  source 1..9: note = Heavy chain CDR3 of Ab-46
EVYGGNSDY

SEQ ID NO: 1579 - protein, 11 aa, synthetic construct
  source 1..11: note = Heavy chain CDR3 of Ab-50
VHAALYYGMDV

SEQ ID NO: 1580 - protein, 12 aa, synthetic construct
  source 1..12: note = Heavy chain CDR3 of Ab-52
GLSYQVSGWFDP

SEQ ID NO: 1581 - protein, 11 aa, synthetic construct
  source 1..11: note = Heavy chain CDR3 of Ab-55
VHPVFSYALDV

SEQ ID NO: 1582 - protein, 9 aa, synthetic construct
  source 1..9: note = Heavy chain CDR3 of Ab-56
DGYGSDPVL

SEQ ID NO: 1583 - protein, 9 aa, synthetic construct
  source 1..9: note = Heavy chain CDR3 of Ab-65
GDFRKPFDY

SEQ ID NO: 1584 - protein, 13 aa, synthetic construct
  source 1..13: note = Light chain CDR1 consensus
TRSSGSIGSNYVQ

SEQ ID NO: 1585 - protein, 13 aa, synthetic construct
  source 1..13: note = Light chain CDR1 of Ab-14
TRSSGNIASNYVQ

SEQ ID NO: 1586 - protein, 11 aa, synthetic construct
  source 1..11: note = Light chain CDR1 of Ab-16
QGDSLRSYYAS

SEQ ID NO: 1587 - protein, 11 aa, synthetic construct
  source 1..11: note = Light chain CDR1 of Ab-22
GGSDIGRKSVH

SEQ ID NO: 1588 - protein, 14 aa, synthetic construct
  source 1..14: note = Light chain CDR1 of Ab-30
TGTSSDVGGYNYVS

SEQ ID NO: 1589 - protein, 11 aa, synthetic construct
  source 1..11: note = Light chain CDR1 of Ab-31
RASQSIGNSLA

SEQ ID NO: 1590 - protein, 11 aa, synthetic construct
  source 1..11: note = Light chain CDR1 of Ab-32
RASQGIGSYLA

SEQ ID NO: 1591 - protein, 11 aa, synthetic construct
  source 1..11: note = Light chain CDR1 of Ab-38
SGDKLGNKYAY

SEQ ID NO: 1592 - protein, 13 aa, synthetic construct
  source 1..13: note = Light chain CDR1 of Ab-42
TRSSGSIDSNYVQ

SEQ ID NO: 1593 - protein, 13 aa, synthetic construct
  source 1..13: note = Light chain CDR1 of Ab-46
TRSSGNIGTNYVQ

SEQ ID NO: 1594 - protein, 11 aa, synthetic construct
  source 1..11: note = Light chain CDR1 of Ab-50
GGNNIGSKGVH

SEQ ID NO: 1595 - protein, 13 aa, synthetic construct
  source 1..13: note = Light chain CDR1 of Ab-52
TRSSGSIASNYVQ

SEQ ID NO: 1596 - protein, 13 aa, synthetic construct
  source 1..13: note = Light chain CDR1 of Ab-55
TRSSGSIASNYVQ

SEQ ID NO: 1597 - protein, 13 aa, synthetic construct
  source 1..13: note = Light chain CDR1 of Ab-56
TRSSGSIASHYVQ

SEQ ID NO: 1598 - protein, 14 aa, synthetic construct
  source 1..14: note = Light chain CDR1 of Ab-65
TLRSGLNVGSYRIY

SEQ ID NO: 1599 - protein, 7 aa, synthetic construct
  source 1..7: note = Light chain CDR2 of consensus, Ab-14, Ab-42, Ab-52, Ab-55
EDNQRPS

SEQ ID NO: 1600 - protein, 7 aa, synthetic construct
  source 1..7: note = Light chain CDR2 of Ab-16
GKNNRPS

SEQ ID NO: 1601 - protein, 7 aa, synthetic construct
  source 1..7: note = Light chain CDR2 of Ab-22
SDRDRPS

SEQ ID NO: 1602 - protein, 7 aa, synthetic construct
  source 1..7: note = Light chain CDR2 of Ab-30
DVSNRPS

SEQ ID NO: 1603 - protein, 7 aa, synthetic construct
  source 1..7: note = Light chain CDR2 of Ab-31
GASSRAT

SEQ ID NO: 1604 - protein, 7 aa, synthetic construct
  source 1..7: note = Light chain CDR2 of Ab-32
AASTLQS

SEQ ID NO: 1605 - protein, 7 aa, synthetic construct
  source 1..7: note = Light chain CDR2 of Ab-38
QDIKRPS

SEQ ID NO: 1606 - protein, 7 aa, synthetic construct
  source 1..7: note = Light chain CDR2 of Ab-46
EDYRRPS

SEQ ID NO: 1607 - protein, 7 aa, synthetic construct
  source 1..7: note = Light chain CDR2 of Ab-50
DDSDRPS

SEQ ID NO: 1608 - protein, 7 aa, synthetic construct
  source 1..7: note = Light chain CDR2 of Ab-56
EDNKRPS

SEQ ID NO: 1609 - protein, 11 aa, synthetic construct
  source 1..11: note = Light chain CDR2 of Ab-65
YKSDSNKQQAS

SEQ ID NO: 1610 - protein, 9 aa, synthetic construct
  source 1..9: note = Light chain CDR3 consensus
QSYDSSTWV

SEQ ID NO: 1611 - protein, 10 aa, synthetic construct
  source 1..10: note = Light chain CDR3 of Ab-14
QSYDSSNLWV

SEQ ID NO: 1612 - protein, 11 aa, synthetic construct
  source 1..11: note = Light chain CDR3 of Ab-16
NSRDSSGNHYV

SEQ ID NO: 1613 - protein, 11 aa, synthetic construct
  source 1..11: note = Light chain CDR3 of Ab-22
QVWDNNSDHYV

SEQ ID NO: 1614 - protein, 9 aa, synthetic construct
  source 1..9: note = Light chain CDR3 of Ab-30
SSYTSSTLP

SEQ ID NO: 1615 - protein, 9 aa, synthetic construct
  source 1..9: note = Light chain CDR3 of Ab-31
QQHTIPTFS

SEQ ID NO: 1616 - protein, 9 aa, synthetic construct
  source 1..9: note = Light chain CDR3 of Ab-32
QQLNNYPIT

SEQ ID NO: 1617 - protein, 8 aa, synthetic construct
  source 1..8: note = Light chain CDR3 of Ab-38
QTWDNSVV

SEQ ID NO: 1618 - protein, 11 aa, synthetic construct
  source 1..11: note = Light chain CDR3 of Ab-42
QSYDSNNRHVI

SEQ ID NO: 1619 - protein, 9 aa, synthetic construct
  source 1..9: note = Light chain CDR3 of Ab-46
QSYHSSGWE

SEQ ID NO: 1620 - protein, 11 aa, synthetic construct
  source 1..11: note = Light chain CDR3 of Ab-50
QVWDSSSDHWV

SEQ ID NO: 1621 - protein, 10 aa, synthetic construct
  source 1..10: note = Light chain CDR3 of Ab-52
QSYDSTTPSV

SEQ ID NO: 1622 - protein, 9 aa, synthetic construct
  source 1..9: note = Light chain CDR3 of Ab-55
QSYDGITVI

SEQ ID NO: 1623 - protein, 10 aa, synthetic construct
  source 1..10: note = Light chain CDR3 of Ab-56
QSYDSSNRWV

SEQ ID NO: 1624 - protein, 9 aa, synthetic construct
  source 1..9: note = Light chain CDR3 of Ab-65
MIWYSSAVV

SEQ ID NO: 1625 - DNA, 717 bp, Homo sapiens
  source 1..717: mol_type = unassigned DNA
gaggtgcagctggtgcagtctgggggaggcgtggtccagcctgggaagtccctgagactctcctgtgcagcctctggattcgccttcagtagttatgctatgcactgggtccgccaggctccaggcaaggggctggagtgggtggcagttatatcatatgatggaagtaataaatactacgcagactccgtgaagggccgattcaccatctccagagacaattccaagaacacgctgtatctgcaaatgaacagcctgagagctgaggacacggctgtgtattactgtgcgagggacaggagctactaccttgactactggggccagggaaccctggtcaccgtctcctcaggtggcggcggttccggaggtggtggttctggcggtggtggcagcgaaacgacactcacgcagtctccagccaccctgtctttgtctccaggggaaagggccaccctctcctgcagggccagtcagagtgttaggagcaacttagcctggtaccagcagaaacctggccaggctcccaggcccctcatctatgatgcatccaccagggccactggcatcccagacaggttcagtggcagtgggtctgggacagacttcactctcaccatcagcagactggagcctgaagattttgcagtttattactgtcagcagcgtagcaactggcctccgacgttcggccaagggaccaaggtggaagtcaaa

SEQ ID NO: 1626 - DNA, 351 bp, Homo sapiens
  source 1..351: mol_type = unassigned DNA
gaggtgcagctggtgcagtctgggggaggcgtggtccagcctgggaagtccctgagactctcctgtgcagcctctggattcgccttcagtagttatgctatgcactgggtccgccaggctccaggcaaggggctggagtgggtggcagttatatcatatgatggaagtaataaatactacgcagactccgtgaagggccgattcaccatctccagagacaattccaagaacacgctgtatctgcaaatgaacagcctgagagctgaggacacggctgtgtattactgtgcgagggacaggagctactaccttgactactggggccagggaaccctggtcaccgtctcctca

SEQ ID NO: 1627 - DNA, 987 bp, Homo sapiens
  source 1..987: mol_type = unassigned DNA
gctagcaccaagggcccatcggtcttccccctggcaccctcctccaagagcacctctgggggcacagcggccctgggctgcctggtcaaggactacttccccgaaccggtgacggtgtcgtggaactcaggcgccctgaccagcggcgtgcacaccttcccggctgtcctacagtcctcaggactctactccctcagcagcgtggtgaccgtgccctccagcagcttgggcacccagacctacatctgcaacgtgaatcacaagcccagcaccaaggtggacaagaaagcagagcccaaatcttgtgacaaaactcacacatccccaccgtgcccagcacctgaactcctggggggaccgtcagtcttcctcttccccccaaaacccaaggacaccctcaggatctcccggacccctgaggtcacatgcgtggtggtggacgtgagccacgaagaccctgaggtcaagttcaactggtacgtggacggcgtggaggtgcataatgccaagacaaagccgcgggaggagcagtacagcacgtaccgggtggtcagcgtcctcaccgtcctgcaccaggactggctgaatggcaaggagtacaagtgcaaggtctccaacaaagccctcccagcccccatcgagaaaaccatctccaaagccaaagggcagccccgagaaccacaggtgtacaccctgcccccatcccgggatgagctgaccaagaaccaggtcagcctgacctgcctggtcaaaggcttctatcccagcgacatcgccgtggagtgggagagcaatgggcagccggagaacaactacaagaccacgcctcccgtgctggactccgacggctccttcttcctctacagcaagctcaccgtggacaagagcaggtggcagcaggggaacgtcttctcatgctccgtgatgcatgaggctctgcacaaccactacacgcagaagagcctctccctgtctccgggtaaatga

SEQ ID NO: 1628 - DNA, 318 bp, Homo sapiens
  source 1..318: mol_type = unassigned DNA
acgacactcacgcagtctccagccaccctgtctttgtctccaggggaaagggccaccctctcctgcagggccagtcagagtgttaggagcaacttagcctggtaccagcagaaacctggccaggctcccaggcccctcatctatgatgcatccaccagggccactggcatcccagacaggttcagtggcagtgggtctgggacagacttcactctcaccatcagcagactggagcctgaagattttgcagtttattactgtcagcagcgtagcaactggcctccgacgttcggccaagggaccaaggtggaagtcaaa

SEQ ID NO: 1629 - DNA, 348 bp, Homo sapiens
  source 1..348: mol_type = unassigned DNA
gatggtaccaaggtggaaatcaaacgtacggtggctgcaccatctgtcttcatcttcccgccatctgatgagcagttgaaatctggaactgcctctgttgtgtgcctgctgaataacttctatcccagagaggccaaagtacagtggaaggtggataacgccctccaatcgggtaactcccaggagagtgtcacagagcaggacagcaaggacagcacctacagcctcagcagcaccctgacgctgagcaaagcagactacgagaaacacaaagtctacgcctgcgaagtcacccatcagggcctgagctcgcccgtcacaaagagcttcaacaggggagagtgttga

SEQ ID NO: 1630 - protein, 102 aa, Homo sapiens
QVQLVQSGGGVPGSLRLSCAASGFTFSSYMSWVRQAPGKGLEWVISGSYYADSVKGRFTISRDNSKNTLYLQMNSLRAEDTAVYYCARDDYWGQGTLVTVSS

SEQ ID NO: 1631 - protein, 116 aa, Homo sapiens
QVQLVQSGGGVVQPGRSLRLSCAASGFTVSSNYMSWVRQAPGKGLEWVSVIYSGGSTYYADSVKGRFTISRDNSKNTLYLQMNSLRAEDTAVYYCAKDYGEGFDYWGQGTLVTVSS

SEQ ID NO: 1632 - protein, 117 aa, Homo sapiens
EVQLVQSGGGLVKPGGSLRLSCAASGFTFSDYYMSWIRQAPGKGLEWVSYISSSGSTIYYADSVKGRFTISRDNAKNSLYLQMNSLRAEDTGVYYCARDWGYSFGDWGQGTLVTVSS

SEQ ID NO: 1633 - protein, 127 aa, Homo sapiens
QVQLVQSGAEVKKPGASVKVSCKASGYTFTTYGISWVRQAPGQGLEWMGWISAYNGNTNYAQKLQGRVTMTTDTSTSTAYMELRSLRSDDTAVYYCARVGYYGDYAWGYYYYGMDVWGQGTLVTVSS

SEQ ID NO: 1634 - protein, 122 aa, Homo sapiens
QVQLQESGGGLVKPGGSLRLSCAASGFTFSDYYMSWIRQAPGKGLEWVSYISSSGSTIYYADSVKGRFTISRDNAKNSLYLQMNSLRAEDTAVYYCARERWLQIGEDAFDIWGQGTTVTVSS

SEQ ID NO: 1635 - protein, 116 aa, Homo sapiens
QVQLVQSGGGLIQPGGSLRLSCAASGFTVSSNYMSWVRQAPGKGLEWVSVIYSGGSTYYADSVKGRFTISRDNSKNTLYLQMNSLRAEDTAVYYCARNFGEDFDYWGQGTLVTVSS

SEQ ID NO: 1636 - protein, 117 aa, Homo sapiens
EVQLVQSGGGVVQPGKSLRLSCAASGFAFSSYAMHWVRQAPGKGLEWVAVISYDGSNKYYADSVKGRFTISRDNSKNTLYLQMNSLRAEDTAVYYCARDRSYYLDYWGQGTLVTVSS

SEQ ID NO: 1637 - protein, 124 aa, Homo sapiens
QVQLVQSGGGLVQPGGSLRLSCAASGFTFSSSWMSWVRQAPGKGLEWVAYIKQDGSEKYYVDSVKGRFTISRDNAKNSLYLQMDSLRAEDTAVYYCARDQGWGWDGTEYYSDYWGQGTLVTVSS

SEQ ID NO: 1638 - protein, 123 aa, Homo sapiens
QVQLVQSGAEVKKPGASVKVSCKASGYTFTSYGISWVRQAPGQGLEWMGWISAYNGNTNYAQKLQGRVTMTTDTSTSTAYMELRSLRSDDTAVYYCARDDLSDYGEWLGPDYWGQGTLVTVSS

SEQ ID NO: 1639 - protein, 81 aa, Homo sapiens
QLTQPSSGSPGQRTISCGSSGNVSWYQQPGAPKLLIYRPSGVPDRFSGSKSGTASLTISGLQEDEADYYCVFGGTKLTVLG

SEQ ID NO: 1640 - protein, 106 aa, Homo sapiens
IQMTQSPSSLSASVGDRVTITCRATQSISTHLNWYQQRGGKAPKLLIYGASTLESGVPSRFSGSGSGTEFTLTISSLQPEDFATYYCLQHRSYPWTFGQGTNVEIK

SEQ ID NO: 1641 - protein, 112 aa, Homo sapiens
SYELTQPPSASGTPGQRVTISCSGSSSSIGSETVNWYQQLPGTAPKLLIYSNNQRPSGVPDRFSGSKSGTSASLAISGLQSEDEADYYCTAWDDTLNGRVIFGGGTKLTVLG

SEQ ID NO: 1642 - protein, 111 aa, Homo sapiens
QTVVTQEPSFSVSPGGTITLTCDLNSGLVSSSHYPSWYQQTPGQAPRTLIYNTNIRSSGVPDRFSGAILGNKAALTITGAQAEDESDYYCVLYMGSGISVFGGGTKLTVLG

SEQ ID NO: 1643 - protein, 111 aa, Homo sapiens
QSALTQPASVSGSPGQSITISCTGTSSDLGGHNFVSWYQQHPGKAPKLMIYDVFNRPSGVSSRFSGSKSGNTASLTISGLQAEDEADYFCSSYTITNIVVFGRGTKLTVLG

SEQ ID NO: 1644 - protein, 106 aa, Homo sapiens
TTLTQSPATLSLSPGERATLSCRASQSVRSNLAWYQQKPGQAPRPLIYDASTRATGIPDRFSGSGSGTDFTLTISRLEPEDFAVYYCQQRSNWPPTFGQGTKVEVK

SEQ ID NO: 1645 - protein, 111 aa, Homo sapiens
QSALTQPASVSGSPGQSITISCTGTSSDVGGYNYVSWYQQHPGKAPKLMIYDVSKRPSGVPDRFSGSKSGNTASLTISGLQAEDEADYFCSSYTITDIVVFGGGTKLTVLR

SEQ ID NO: 1646 - protein, 111 aa, Homo sapiens
QPGLTQPPSASGTPGQRVTISCSGSRSNIGGNTVNWYQHVPGTAPKLLIYSNNQRPSGVPDRFSGSKSGTSASLAISGLRSEDEAEYYCATWEDSLSGYVFGPGTKVTVLG

SEQ ID NO: 1647 - protein, 15 aa, Homo sapiens
RTMHPSDEFLPLGMP

SEQ ID NO: 1648 - protein, 15 aa, Homo sapiens
VVPLGRCVSHPAICA

SEQ ID NO: 1649 - protein, 15 aa, Homo sapiens
SVDDCRWNLNCEPPP

SEQ ID NO: 1650 - protein, 13 aa, Homo sapiens
CLSATCDCTLCGP

SEQ ID NO: 1651 - protein, 15 aa, Homo sapiens
GTGLVPLFDPRYRFL

SEQ ID NO: 1652 - protein, 15 aa, Homo sapiens
PNCWVGLTGAHSCFL

SEQ ID NO: 1653 - protein, 14 aa, Homo sapiens
YQADCLMNRCPTAE

SEQ ID NO: 1654 - protein, 669 aa, Homo sapiens
MFIFLLFLTLTSGSDLDRCTTFDDVQAPNYTQHTSSMRGVYYPDEIFRSDTLYLTQDLFLPFYSNVTGFHTINHTFGNPVIPFKDGIYFAATEKSNVVRGWVFGSTMNNKSQSVIIINNSTNVVIRACNFELCDNPFFAVSKPMGTQTHTMIFDNAFNCTFEYISDAFSLDVSEKSGNFKHLREFVFKNKDGFLYVYKGYQPIDVVRDLPSGFNTLKPIFKLPLGINITNFRAILTAFSPAQDIWGTSAAAYFVGYLKPTTFMLKYDENGTITDAVDCSQNPLAELKCSVKSFEIDKGIYQTSNFRVVPSGDVVRFPNITNLCPFGEVFNPSVYAWERKKISNCVADYSVLYNSTFFSTFKCYGVSATKLNDLCFSNVYADSFVVKGDDVRQIAPGQTGVIADYNYKLPDDFMGCVLAWNTRNIDATSTGNYNYKYRYLRHGKLRPFERDISNVPFSPDGKPCTPPALNCYWPLNDYGFYTTTGIGYQPYRVVVLSFELLNAPATVCGPKLSTDLIKNQCVNFNFNGLTGTGVLTPSSKRFQPFQQFGRDVSDFTDSVRDPKTSEILDISPCAFGGVSVITPGTNASSEVAVLYQDVNCTDVSTAIHADQLTPAWRIYSTGNNVFQTQAGCLIGAEHVDTSYECDIPIGAGICASYHTVSLLRSTSQKS

SEQ ID NO: 1655 - protein, 20 aa, Homo sapiens
RVVVLSFELGPPGGPFGEVF

SEQ ID NO: 1656 - protein, 14 aa, Homo sapiens
VVVSFELNLCPFGE

SEQ ID NO: 1657 - protein, 11 aa, Homo sapiens
  VARIANT 5..7: note = Any amino acid
SFELXXXPFGE

SEQ ID NO: 1658 - protein, 13 aa, Homo sapiens
  VARIANT 5..9: note = Any amino acid
SFELXXXXXPFGE

SEQ ID NO: 1659 - protein, 5 aa, Homo sapiens
VYDNK

SEQ ID NO: 1660 - protein, 5 aa, Homo sapiens
RSYYL

SEQ ID NO: 1661 - protein, 10 aa, Homo sapiens
RASQVRSNLA

SEQ ID NO: 1662 - protein, 6 aa, Homo sapiens
DASTAT

SEQ ID NO: 1663 - protein, 9 aa, Homo sapiens
QQRSNWPPT

SEQ ID NO: 1664 - protein, 13 aa, Homo sapiens
CLSATCDCTLCGP

SEQ ID NO: 1665 - DNA, 390 bp, synthetic construct; identical to SEQ ID NO: 1471
  source 1..390: mol_type = other DNA

SEQ ID NO: 1666 - protein, 130 aa, synthetic construct; identical to SEQ ID NO: 1472

SEQ ID NO: 1667 - DNA, 330 bp, synthetic construct
  source 1..330: mol_type = other DNA
aattttatgctgactcagccaccctcagcgtctgggacccccgggcagagggtcaccatctcttgctctggaagcagctccaacatcggaggtaatactgtacactggttccagcagctcccaggaacggcccccaaactcctcatctatactaatagtctgcggccctcaggggtccctgaccgattctctggctccaagtctggcacctcagcctccctggccatcagtgggctccagtctgaggatgaggctgattattactgtgcagcatgggatgacagcctaaatggtcaggtgttcggcggagggaccaagctgaccgtccta

SEQ ID NO: 1668 - protein, 110 aa, synthetic construct; identical to SEQ ID NO: 1473

SEQ ID NO: 1669 - DNA, 330 bp, synthetic construct; identical to SEQ ID NO: 1474
  source 1..330: mol_type = other DNA

SEQ ID NO: 1670 - protein, 110 aa, synthetic construct; identical to SEQ ID NO: 1475

SEQ ID NO: 1671 - protein, 8 aa, synthetic construct
GFTFSNYG

SEQ ID NO: 1672 - protein, 8 aa, synthetic construct
ISFDGSKK

SEQ ID NO: 1673 - protein, 25 aa, synthetic construct
CAKLPSPYYFDSRFVWVAASAFHFW

SEQ ID NO: 1674 - protein, 8 aa, synthetic construct
SSNIGGNT

SEQ ID NO: 1675 - skipped

SEQ ID NO: 1676 - protein, 13 aa, synthetic construct [sequence omitted]

SEQ ID NO: 1677 - protein, 13 aa, synthetic construct
CAAWDNSLNGQVF

SEQ ID NO: 1678 - DNA, 354 bp, synthetic construct; identical to SEQ ID NO: 1315
  source 1..354: mol_type = other DNA

SEQ ID NO: 1679 - DNA, 336 bp, synthetic construct; identical to SEQ ID NO: 1317
  source 1..336: mol_type = other DNA

SEQ ID NO: 1680 - DNA, 354 bp, synthetic construct; identical to SEQ ID NO: 1182
  source 1..354: mol_type = other DNA

SEQ ID NO: 1681 - DNA, 336 bp, synthetic construct; identical to SEQ ID NO: 1184
  source 1..336: mol_type = other DNA

SEQ ID NO: 1682 - DNA, 354 bp, synthetic construct; identical to SEQ ID NO: 1186
  source 1..354: mol_type = other DNA

SEQ ID NO: 1683 - DNA, 336 bp, synthetic construct; identical to SEQ ID NO: 1188
  source 1..336: mol_type = other DNA

SEQ ID NO: 1684 - DNA, 354 bp, synthetic construct; identical to SEQ ID NO: 1190
  source 1..354: mol_type = other DNA

SEQ ID NO: 1685 - DNA, 336 bp, synthetic construct; identical to SEQ ID NO: 1192
  source 1..336: mol_type = other DNA

SEQ ID NO: 1686 - DNA, 354 bp, synthetic construct; identical to SEQ ID NO: 1194
  source 1..354: mol_type = other DNA

SEQ ID NO: 1687 - DNA, 336 bp, synthetic construct
  source 1..336: mol_type = other DNA
gacatcgtgatgacccagagccccgacagcctggccgtgagcctgggcgagcgggccactatagcagctacaccttcggccagggcacaaagctggaaatcaagccatcaactgcaagagcagccagagcatcctgtacagcagcaaccagaagaactacctggcctggtatcagcagaagcccggccagagccccaagctgctgatctactgggccagcacccgggagagcggcgtgcccgaccggtttagcggcagcggctccggcaccgacttcaccctgaccatcagcagcctgcaggccgaggacgtggccgtgtactactgccaccagta

SEQ ID NO: 1688 - DNA, 354 bp, synthetic construct; identical to SEQ ID NO: 966
  source 1..354: mol_type = other DNA

SEQ ID NO: 1689 - DNA, 336 bp, synthetic construct; identical to SEQ ID NO: 968
  source 1..336: mol_type = other DNA

SEQ ID NO: 1690 - protein, 118 aa, synthetic construct; identical to SEQ ID NO: 1199

SEQ ID NO: 1691 - protein, 112 aa, synthetic construct; identical to SEQ ID NO: 1201

SEQ ID NO: 1692 - protein, 118 aa, synthetic construct; identical to SEQ ID NO: 1183

SEQ ID NO: 1693 - protein, 112 aa, synthetic construct; identical to SEQ ID NO: 1185

SEQ ID NO: 1694 - protein, 118 aa, synthetic construct; identical to SEQ ID NO: 1187

SEQ ID NO: 1695 - protein, 112 aa, synthetic construct; identical to SEQ ID NO: 1189

SEQ ID NO: 1696 - protein, 118 aa, synthetic construct; identical to SEQ ID NO: 1191

SEQ ID NO: 1697 - protein, 112 aa, synthetic construct; identical to SEQ ID NO: 1193

SEQ ID NO: 1698 - protein, 118 aa, synthetic construct; identical to SEQ ID NO: 1195

SEQ ID NO: 1699 - protein, 112 aa, synthetic construct; identical to SEQ ID NO: 1197

SEQ ID NO: 1700 - protein, 118 aa, synthetic construct; identical to SEQ ID NO: 967

SEQ ID NO: 1701 - protein, 112 aa, synthetic construct; identical to SEQ ID NO: 969

SEQ ID NO: 1702 - protein, 8 aa, synthetic construct
GYTFASYY

SEQ ID NO: 1703 - protein, 8 aa, synthetic construct
INPGNVNT

SEQ ID NO: 1704 - protein, 9 aa, synthetic construct
STYYRPLDY

SEQ ID NO: 1705 - protein, 12 aa, synthetic construct
QSILYSSNQKNY

SEQ ID NO: 1706 - protein, 6 aa, synthetic construct
WASTRE

SEQ ID NO: 1707 - protein, 8 aa, synthetic construct
HQYLSSYT

SEQ ID NO: 1708 - protein, 8 aa, synthetic construct
GYTFASYY

SEQ ID NO: 1709 - protein, 8 aa, synthetic construct
INPGNVNT

SEQ ID NO: 1710 - protein, 9 aa, synthetic construct
STYYRPLDY

SEQ ID NO: 1711 - protein, 12 aa, synthetic construct
QSILYSSNQKNY

SEQ ID NO: 1712 - protein, 6 aa, synthetic construct
WASTRE

SEQ ID NO: 1713 - protein, 8 aa, synthetic construct
HQYLSSYT

SEQ ID NO: 1714 - protein, 8 aa, synthetic construct
GYTFASQW

SEQ ID NO: 1715 - protein, 8 aa, synthetic construct
INPGNVNT

SEQ ID NO: 1716 - protein, 9 aa, synthetic construct
STWYRPLDY

SEQ ID NO: 1717 - protein, 12 aa, synthetic construct
QSILYSSNQKNY

SEQ ID NO: 1718 - protein, 6 aa, synthetic construct
WASTRE

SEQ ID NO: 1719 - protein, 8 aa, synthetic construct
HQYISSYT

SEQ ID NO: 1720 - protein, 8 aa, synthetic construct
GYTFASSW

SEQ ID NO: 1721 - protein, 8 aa, synthetic construct
INPGNVNT

SEQ ID NO: 1722 - protein, 9 aa, synthetic construct
STWYRPNDY

SEQ ID NO: 1723 - protein, 12 aa, synthetic construct
QSILYSSNQKNY

SEQ ID NO: 1724 - protein, 6 aa, synthetic construct
WASTRE

SEQ ID NO: 1725 - protein, 8 aa, synthetic construct
HQYKSSYT

SEQ ID NO: 1726 - protein, 8 aa, synthetic construct
GYTFASSW

SEQ ID NO: 1727 - protein, 8 aa, synthetic construct
INPGNVNT

SEQ ID NO: 1728 - protein, 9 aa, synthetic construct
TIRYRPLDY

SEQ ID NO: 1729 - protein, 12 aa, synthetic construct
QSILYSSNQKNY

SEQ ID NO: 1730 - protein, 6 aa, synthetic construct
WASTRE

SEQ ID NO: 1731 - protein, 8 aa, synthetic construct
HQYRSSYT

SEQ ID NO: 1732 - protein, 8 aa, synthetic construct
GYTFASSW

SEQ ID NO: 1733 - protein, 8 aa, synthetic construct
INPGNVNT

SEQ ID NO: 1734 - protein, 9 aa, synthetic construct
LTYYRPPDY

SEQ ID NO: 1735 - protein, 12 aa, synthetic construct
QSILYSSNQKNY

SEQ ID NO: 1736 - protein, 6 aa, synthetic construct
WASTRE

SEQ ID NO: 1737 - protein, 8 aa, synthetic construct
HQYYSSYT

SEQ ID NO: 1738 - protein, 8 aa, synthetic construct
GYTFASAW

SEQ ID NO: 1739 - protein, 8 aa, synthetic construct
INPGNVNT

SEQ ID NO: 1740 - protein, 9 aa, synthetic construct
STYYRPLDY

SEQ ID NO: 1741 - protein, 12 aa, synthetic construct
QSILYSSNQKNY

SEQ ID NO: 1742 - protein, 6 aa, synthetic construct
WASTRE

SEQ ID NO: 1743 - protein, 8 aa, synthetic construct
HQYMSSYT

SEQ ID NO: 1744 - DNA, 354 bp, synthetic construct; identical to SEQ ID NO: 1163
  source 1..354: mol_type = other DNA

SEQ ID NO: 1745 - DNA, 321 bp, synthetic construct
  source 1..321: mol_type = other DNA
gacatccagatgacccagagccccagcagcctgagcgccagcgtgggcgacagagtgaccatcacctgcagagccagccagggcatcagcagcaacatcgtgtggtaccagcagaagcccggcaaggcccccaagggcctgatctaccacggcaccaacctggagagcggcgtgcccagcagattcagcggcagcggcagcggcaccgactacaccctgaccatcagcagcctgcagcccgaggacttcgccacctactactgcgtgcagtacagccagttcccccccaccttcggccagggcaccaagctggagatcaag

SEQ ID NO: 1746 - DNA, 354 bp, synthetic construct; identical to SEQ ID NO: 1153
  source 1..354: mol_type = other DNA

SEQ ID NO: 1747 - DNA, 321 bp, synthetic construct; identical to SEQ ID NO: 1155
  source 1..321: mol_type = other DNA

SEQ ID NO: 1748 - DNA, 354 bp, synthetic construct; identical to SEQ ID NO: 1163
  source 1..354: mol_type = other DNA

SEQ ID NO: 1749 - DNA, 321 bp, synthetic construct; identical to SEQ ID NO: 1155
  source 1..321: mol_type = other DNA

SEQ ID NO: 1750 - protein, 118 aa, synthetic construct; identical to SEQ ID NO: 1164

SEQ ID NO: 1751 - protein, 106 aa, synthetic construct
DIQMTQSPSSLSASVGDRVTITCRASQGISSNIVWYQQKPGKAPKGLIYHGTNLESGVPSRFSGSGSGTDYTLTISSLQPEDFATYYCVQYSQFPPTFGQGTKLEI

SEQ ID NO: 1752 - protein, 118 aa, synthetic construct; identical to SEQ ID NO: 1154

SEQ ID NO: 1753 - protein, 107 aa, synthetic construct; identical to SEQ ID NO: 1156

SEQ ID NO: 1754 - protein, 118 aa, synthetic construct; identical to SEQ ID NO: 1164

SEQ ID NO: 1755 - protein, 107 aa, synthetic construct; identical to SEQ ID NO: 1156

SEQ ID NO: 1756 - protein, 8 aa, synthetic construct
GYTFTSYW

SEQ ID NO: 1757 - protein, 8 aa, synthetic construct
VSPGNSDT

SEQ ID NO: 1758 - protein, 12 aa, synthetic construct
TRSRYGNNALDY

SEQ ID NO: 1759 - protein, 9 aa, synthetic construct
QGISSNIVW

SEQ ID NO: 1760 - skipped

SEQ ID NO: 1761 - protein, 9 aa, synthetic construct
VQYSQFPPT

SEQ ID NO: 1762 - DNA, 354 bp, synthetic construct
  source 1..354: mol_type = other DNA
caggtgcagctggtgcagtctggggctgaggtgaagaagcctggggcctcagtgaaagtctcctgcaaggcttctggatacaccttcagcggctactctacacactggctgcgacaggtccctggacagggacttgagtggattggatgggacaaccctagtagtggtgacacgacctatgcagagaattttcggggcagggtcaccctgaccagggacacgtccatcaccacagattacttggaagtgaggggtctaagatctgacgacacggccgtctattattgtgccagaggcggagatgactacagctttgaccattggggtcagggcaccctggtcaccgtctcctca

SEQ ID NO: 1763 - DNA, 327 bp, synthetic construct; identical to SEQ ID NO: 1227
  source 1..327: mol_type = other DNA

SEQ ID NO: 1764 - protein, 118 aa, synthetic construct
QVQLVQSGAEVKKPGASVKVSCKASGYTFSGYSTHWLRQVPGQGLEWIGWDNPSSGDTTYAENFRGRVTLTRDTSITTDYLEVRGLRSDDTAVYYCARGGDDYSFDHWGQGTLVTVSS

SEQ ID NO: 1765 - protein, 109 aa, synthetic construct
SSELTQDPAVSVALGQTVRITCRGDSLRSYYASWYQQKPGQAPVLVIYGENNRPSGIPDRFSGSSSGDTASLTITGAQAEDEADYYCNSRDSSDHLLLFGGGTKLTVLG

SEQ ID NO: 1766 - protein, 5 aa, synthetic construct
GYSTH

SEQ ID NO: 1767 - protein, 17 aa, synthetic construct
WDNPSSGDTTYAENFRG

SEQ ID NO: 1768 - protein, 9 aa, synthetic construct
GGDDYSFDH

SEQ ID NO: 1769 - protein, 11 aa, synthetic construct
RGDSLRSYYAS

SEQ ID NO: 1770 - protein, 7 aa, synthetic construct
GENNRPS

SEQ ID NO: 1771 - protein, 11 aa, synthetic construct
NSRDSSDHLLL

SEQ ID NO: 1772 - DNA, 364 bp, Homo sapiens
  source 1..364: mol_type = unassigned DNA
caggtgcagctggtgcagtctgggggaggcgtggtacagcctggggggtccctgagactctcctgtgcagcctctggattcacctttgatgattatgccatgcactgggtccggcaagctccagggaagggcctggagtgggtctcaagtcttagttggaatactggtcgagtagcctatgcggactctgtgaagggccgattcaccatctccagagacaacgccaagaattccctgtatctgcaaatgaacagtctgagacctgaggacacggccttctattactgtgcaaaaggctccgcccttggcttagttggctggttcgacgcctggggccagggcaccctggtcaccgtctcctcag

SEQ ID NO: 1773 - DNA, 322 bp, Homo sapiens
  source 1..322: mol_type = unassigned DNA
tcttctgagctgactcaggaccctgctgtgtctgtggccttgggacagacagtcaggatcacatgccaaggagacagtctcagaacctattatggaagttggtaccagcagaagccaggacaggcccctctacttgtcttctatggcaaagagagtcggccctcagggatcccagaccgattctctggctccacctcaggaaacacagcttccttgaccatcactggggctcaggcggaagatgaggctgactattactgtaactcccaggacagcagtggtgacttattattcggcggagggaccaagctgaccgtcctag

SEQ ID NO: 1774 - DNA, 352 bp, Homo sapiens
  source 1..352: mol_type = unassigned DNA
caggtgcagctggtgcaatctgggggaggcttggtccagtctgggaagtccgtgagactctcttgtgcagcctctggattcacatttggtgattatgccatgcactgggtccggcaagctccaggaaagggcctggagtgggtcgcaggcattactaggaatagtggtcgcatagcctatgcggactttgtgaagggccgattcatcatctccagagacaacgccaagaactcactgtatctgcaaatgaacagcctgagagccgaggacacggctgtgtattactgtgcgagcgaaatgactggggcttatgatatttggggccaagggaccacggtcaccgtctcctcag

SEQ ID NO: 1775 - DNA, 325 bp, Homo sapiens
  source 1..325: mol_type = unassigned DNA
tcttctgagctgactcaggaccctgctgtgtctgtggccttgggacagacagtcaggatcacatgccaaggagacggcctcagatactattatgcaagctggtaccagcagaagccaggacaggcccctatacttgtcctctttggtaaaaacaaccggccctcagggatcccagaccgattctctggctccagctcaggaaatacagcttccttgaccatcactggggctcaggcggaagatgaggctgactattactgtaactcgcgggacagcagtggtaaccatcgattcttcggaactgggaccaaggtcaccgtcctaa

SEQ ID NO: 1776 - DNA, 361 bp, Homo sapiens
  source 1..361: mol_type = unassigned DNA
caggtgcagctggtgcagtctgggggaggcgtggtccagcctgggaggtccctgagactctcctgtgcagcctctggattcaccttcagtagctatgctatgcactgggtccgccaggctccaggcaaggggctggagtgggtggcagttatatcatatgatggaagcaataaatactacgcagactccgtgaagggccgattcaccatctccagagacaattccaagaacacgctgtatctgcaaatgaacagcctgagagctgaggacacggctgtatattactgtgcgaaagaggattactatgatagtagtggttcgaactactggggccagggaaccctggtcaccgtctcctcag

SEQ ID NO: 1777 - DNA, 331 bp, Homo sapiens
  source 1..331: mol_type = unassigned DNA
ctgcctgtgctgactcagccaccctcagcgtctgggacccccgggcagagggtcaccatctcttgttctggaagcagctccaacatcggaagtaattatgtatactggtaccagcagctcccaggaacggcccccaaactcctcacctataggaatgatcagcggccctcaggggtccctgaccgattctctggctccaagtctggcacctcagcctccctggccatcagtgggctccggtccgaggatgaggctgattatttctgttcagcttgggatgacagcctgggtggcgaggtcttcggaactgggaccaaggtcaacgtcctag

SEQ ID NO: 1778 - DNA, 355 bp, Homo sapiens
  source 1..355: mol_type = unassigned DNA
caggtgcagctggtgcagtctgggggaggcttggtacagcctggggggtccctgagactctcctgtgcagcctctggattcacctttagcagccatgccatgagctgggtccgccaggctccagggaaggggctggagtgggtctcagctattagtggtagtggtggtagcacatactacgcagactccgtgaagggccggttcaccatctccagagacaattccaagaacacgctgtatctgcaaatgaacagcctgagagccgaggacacggccgtatattactgtgcgaaaatcggtacggcggatgcttttgatatctggggccaagggaccacggtcaccgtctcctcag

SEQ ID NO: 1779 - DNA, 331 bp, Homo sapiens
  source 1..331: mol_type = unassigned DNA
cagtctgccctgactcagccaccctcagtgtctgggacccccggacagagggtcaccatctcttgttctggaggcgtccccaacatcggaagtaatcctgtaaactggtacctccaccgcccaggaacggcccccaaactcctcatctataatagcaatcagtggccctcaggggtccctgaccgattttctggctccaggtctggcacctcagcctccctggccatcagtgggctccagtctgaggatgaggctgattattactgtgcagcatgggatgacagcctggatggtctggttttcggcggagggaccaagttgaccgtcctag

SEQ ID NO: 1780 - DNA, 373 bp, Homo sapiens
  source 1..373: mol_type = unassigned DNA
caggtgcagctggtgcagtctggggctgaggtgaagaagcctggggcctcagtgaaggtttcctgcaaggcatctggatacaccttcaccagctactatatgcactgggtgcgacaggcccctggacaagggcttgagtggatgggaataatcaaccctagtggtggtagcacaagctacgcacagaagttccagggcagagtcaccatgaccagggacacgtccacgagcacagtctacatggagctgagcagcctgagatctgaggacacggccgtgtattactgtgctagagaaaaaagcagcagctggtacgggggggacaactggttcgacccctggggccagggcaccctggtcaccgtctcctcag

SEQ ID NO: 1781 - DNA, 331 bp, Homo sapiens
  source 1..331: mol_type = unassigned DNA
cagtctgccctgactcagcctcgctcagtgtccgggtctcctggacagtcagtcaccatctcctgcactggaagcagcagtgatgttggtggttatcattatgtctcctggtaccaacaatacccaggcaaagtccccaaactgatgatttatgatgtctctaggcggccctcaggggtttctgatcgcttctctggctccaagtctggcagcacggcctccctgaccatctctgggctccaggctgaggacgaggctgattattactgcagctcatatacaagcagcagcactgtggtcttcggcggagggaccaagctgaccgtcctac

SEQ ID NO: 1782 - DNA, 390 bp, Homo sapiens
  source 1..390: mol_type = unassigned DNA
caggtgcagctggtgcaatctggagctgaggtgaagaagcctggggcctcagtgaaggtctcctgcaaggcttctggttacacctttaccagctatggtatcagctgggtgcgacaggcccctggacaagggcttgagtggatgggatggatcagcgcttacaatggtaacacaaactatgcacagaagctccagggcagagtcaccatgaccacagacacatccacgagcacagcctacatggagctgaggagcctgagatctgacgacacggccgtgtattactgtgcgagagatgtacaccccttagatatagcagtggctgccgacgattactactactacggtatggacgtctggggccaaggcaccctggtcaccgtctcctca

SEQ ID NO: 1783 - DNA, 325 bp, Homo sapiens
  source 1..325: mol_type = unassigned DNA
tcttctgagctgactcaggaccctgctgtgtctgtggccttgggacagacagtcaggatcacatgccaaggagacagcctcacaaccaattatgcaagctggtaccagcagaagccaggacaggcccctgttcttgtcatctatggtaaaaacaagcggccctcagggatcccagaccgattctctggctccatctcagggaacacagcttccttgaccatcactggggctcaggcggaggatgaggctgactattactgtaactcccgggacagcagtggtaagcattatgtcttcggaactgggaccaaggtcaccgtcctag

SEQ ID NO: 1784 - DNA, 367 bp, Homo sapiens
  source 1..367: mol_type = unassigned DNA
gaggtgcagctggtggagtctgggggaggcgtggtccagcctgggaggtccctgagactctcctgtgcagcctctggattcacctttagcagctatgccatgagctgggtccgccaggctccagggaaggggctggagtgggtctcagctattagtggtagtggtggtagcacatactacgcagactccgtgaagggccggttcaccatctccagagacaattccaagaacacgctgtatctgcaaatgaacagcctgagagccgaggacacggccgtatattactgtgcgaaagattggggcctagtacaactggaatccggctatgactactggggccagggaaccctggtcaccgtctcctcag

SEQ ID NO: 1785 - DNA, 334 bp, Homo sapiens
  source 1..334: mol_type = unassigned DNA
cagtctgtgctgactcagccaccctcagtgtctggggccccagggcagagggtcaccatctcctgcactgggagcagctccaacatcggggcaggttatgatgtacactggtaccaacagcttccaggaaaagcccccaaactcctcatctatgataataccaatcggccctcgggggtccctgaccgattctctggctccaagtctggcacctcagcctccctggccatcagtgggctccagtctgaggatgaggctgattattactgtgcagcatgggatgaaagcctgaatggtcaggtcttcggaactgggaccaaggtcaccgtcctag

SEQ ID NO: 1786 - DNA, 367 bp, Homo sapiens
  source 1..367: mol_type = unassigned DNA
caggtacagctgcagcagtcaggcccaggactggtgaagccttcggggaccctgtccctcacctgcgctgtctctggtggctccatcagcagtagtgactggtggagttgggtccgccaggtcccagggaaggggctggagtggattggggaaatctatcacagtggcagtcccaactacaacccgtccctcaggggtcgagtcaccatatcagtagacaagtcgaagaaccagttctccctgaagctgagctctgtgaccgccgcggacacggccgtctattactgtgcgagagaaagagttgctcctacagtagacggtgcttttgatgtctggggccaagggacaatggtcaccgtctcctcag

SEQ ID NO: 1787 - DNA, 322 bp, Homo sapiens
  source 1..322: mol_type = unassigned DNA
gacatcgtgatgacccagtctccatcctccctgtctgcatctgtaggagacagagtcaccatcacttgccgggcaagtcagagcattaccacctatttaaattggtatcagcagaaaccagggaaagcccctaagctcctgatctatgctgcatccagtttgcaaagtggggtcccatcaaggttcagtggcagtggatctgggacagaattcactctcactatcagcagcctgcagcctgaagattttgcaacttattattgtcaacaggccagcagtttccctctcactttcggcggagggaccaaggtggatctcaaac

SEQ ID NO: 1788 - DNA, 364 bp, Homo sapiens
  source 1..364: mol_type = unassigned DNA
gaggtgcagctggtgcagtctggagctgaggtgaaaaagcccggggagtctctgaagatctcctgtaagggttcgggatacagctttaccaactactggatcggctgggtgcgccagatgcccgggaaaggcctggagtggattgggatcatctatcctggtgactctgataccagatacagcccgtccttccaaggccaggtcaccatctcagccgacaagtccaccagcactgcctacctgcagtggagcagcctgaaggcctcggacaccgccatgtattactgtgcgaggataaagagttactatgatagtagtggttattacctctggggccagggaaccctggtcaccgtctcctcag

SEQ ID NO: 1789 - DNA, 322 bp, Homo sapiens
  source 1..322: mol_type = unassigned DNA
cagtctgtgctgactcagccaccctcggtgtcagtggccccaggacagacggccagcataacctgtgggggaaacaacattgggagtaaaagtgtgcactggtaccagcagaagccaggccaggcccctgtcctggtcgtctatgatgatagcgaccggccctcagggatccctgagcgattctctggctccaactctgggaacacggccaccctgaccatcagcagggtcgaagccggggatgaggccgactattactgtcaggtgtgggatagtagtagtgaagaggtattcggcggagggaccaagctgaccgtcctag

SEQ ID NO: 1790 - DNA, 346 bp, Homo sapiens
  source 1..346: mol_type = unassigned DNA
gaggtgcagctggtgcagtctgggggaggcttggtacagcctggggggtccctgagactctcctgtgcagcctctggattcacctttagcagctatgccatgagctgggtccgccaggctccagggaaggggctggagtgggtctcagctattagtggtagtggtggtagcacatactacgcagactccgtgaagggccggttcaccatctccagagacaattccaagaacacgctgtatctgcaaatgaacagcctgagagccgacgacacggctgtctattactgtgcgagaagggggttcatggacgtctggggcaaaggcaccctggtcaccgtctcctcag

SEQ ID NO: 1791 - DNA, 325 bp, Homo sapiens
  source 1..325: mol_type = unassigned DNA
tcttctgagctgactcaggaccctgctgtgtctgtggccttgggacagacagtcaccatcacatgccaaggagacatcctcgaagcctattatgcaagttggtaccagcagaggccaggacaggcccctgtccttgtcatctatggcgaaaacaaccggccctcagggatcccagaccggttctctggctccaggtcaggaaacacagcctccttgaccatcactggggctcaggcggaagatgaggctgactattattgtaactctcgggacagcagtggtagccatgtggtattcggcggagggaccaagatgaccgtcctgg

SEQ ID NO: 1792 - DNA, 346 bp, Homo sapiens
  source 1..346: mol_type = unassigned DNA
caggtgcagctggtgcagtctgggggaggcttggtacagcctggggggtccctgagactctcctgtgcagcctctggattcacctttaacagctttgccatgacctgggtccgccaggctccagggaaggggctggagtgggtctcaggtattagtggtagtggtggtagcacatactacgcagactccgtgaagggccggttcaccatctccagagacaattccaagaacacgctgtatctgcaaatgaacagcctgagagccgaggacacggccgtatattactgtgcgaaagggcacgcttttgatatctggggccaagggaccacggtcaccgtctcctcag

SEQ ID NO: 1793 - DNA, 337 bp, Homo sapiens
  source 1..337: mol_type = unassigned DNA
gacatcgtgatgacccagtctccactctctctgtccgtcacccctgggcagccggcctccatctcctgcaagtctagtcagagcctcctgcatagtgatggaaagacctatttgtattggtacctgcagaagccaggccagcctccacaactcctgatctatgaagtttccaaccggttctctggagtgccagataggttcagtggcagcgggtcagggacagatttcacactgaaaatcagccgggtggaggctgaggatgttggggtttattactgcatgcaaagtatacagcttcctctcactttcggcggagggaccaaggtggagatcaaac

SEQ ID NO: 1794 - DNA, 352 bp, Homo sapiens
  source 1..352: mol_type = unassigned DNA
caggtgcagctggtgcagtctgggggaggcttggtacagcctggggggtccctgagactctcctgtgcagcctctggattcacctttagcagctatgccatgagctgggtccgccaggctccagggaaggggctggagtgggtctcagctattagtggtagtggtggtagcacatactacgcagactccgtgaagggccggttcaccatctccagagacaattccaagaacacgctgtatctgcaaatgaacagcctgagagccgaggacacggctgtgtattactgtgcgaaagataaaggtggggggttcgacccctggggccagggaaccctggtcaccgtctcctcag

SEQ ID NO: 1795 - DNA, 331 bp, Homo sapiens
  source 1..331: mol_type = unassigned DNA
aattttatgctgactcagccccactctgtgtcggagtctccggggaagacggtaaccatctcctgcacccgcagcagtggcagcattgccagcaactatgtgcagtggtaccagcagcgcccgggcagttcccccaccactgtgatctatgaggataaccaaagaccctctggggtccctgatcggttctctggctccatcgacagctcctccaactctgcctccctcaccatctctggactgaagactgaggacgaggctgactactactgtcagtcttatgatagtacctctcatgtcttcggaactgggacccaggtcaccgtcctag

SEQ ID NO: 1796 - DNA, 373 bp, Homo sapiens
  source 1..373: mol_type = unassigned DNA
gaggtgcagctggtgcagtctggagcagaggtgaaaaagcccggggagtctctgaagatctcctgtaagggttctggatacagctttaccaactactggatcggctgggtgcgccagatgcccgggaaaggcctggagtgggtggggatcatctatcctggtgactctgataccagatacagcccgtccttccaaggccaggtcaccatctcagccgacaagtccatcagcaccgcctacctgcagtggagcagcctgaaggcctcggacaccgccatgtattactgtgcgagaccagggtattactatggttcggggagttattataacgttgactactggggccagggcaccctggtcaccgtctcctcag

SEQ ID NO: 1797 - DNA, 322 bp, Homo sapiens
  source 1..322: mol_type = unassigned DNA
cagcctgggctgactcagccaccctcagtgtccgtgtccccaggacagacagccagcatcacctgctctggagatgaattgggggataaatttgctttctggtatcaacaaaagccaggccagtcccctgtgctggtcatctatcaagatagtaagaggccctcagggatccctgagcgattctctggctccatctctgggaacacggccaccctgactatcagcagggtcgaggccggagatgaggccgactatttctgtcaggtgtgggatagcaatggtggtcccccattcgggagagggaccaagctgaccgtcctag

SEQ ID NO: 1798 - protein, 121 aa, Homo sapiens
QVQLVQSGGGVVQPGGSLRLSCAASGFTFDDYAMHWVRQAPGKGLEWVSSLSWNTGRVAYADSVKGRFTISRDNAKNSLYLQMNSLRPEDTAFYYCAKGSALGLVGWFDAWGQGTLVTVSS

SEQ ID NO: 1799 - protein, 107 aa, Homo sapiens
SSELTQDPAVSVALGQTVRITCQGDSLRTYYGSWYQQKPGQAPLLVFYGKESRPSGIPDRFSGSTSGNTASLTITGAQAEDEADYYCNSQDSSGDLLFGGGTKLTVL

SEQ ID NO: 1800 - protein, 117 aa, Homo sapiens
QVQLVQSGGGLVQSGKSVRLSCAASGFTFGDYAMHWVRQAPGKGLEWVAGITRNSGRIAYADFVKGRFIISRDNAKNSLYLQMNSLRAEDTAVYYCASEMTGAYDIWGQGTTVTVSS

SEQ ID NO: 1801 - protein, 108 aa, Homo sapiens
SSELTQDPAVSVALGQTVRITCQGDGLRYYYASWYQQKPGQAPILVLFGKNNRPSGIPDRFSGSSSGNTASLTITGAQAEDEADYYCNSRDSSGNHRFFGTGTKVTVL

SEQ ID NO: 1802 - protein, 120 aa, Homo sapiens
QVQLVQSGGGVVQPGRSLRLSCAASGFTFSSYAMHWVRQAPGKGLEWVAVISYDGSNKYYADSVKGRFTISRDNSKNTLYLQMNSLRAEDTAVYYCAKEDYYDSSGSNYWGQGTLVTVSS

SEQ ID NO: 1803 - protein, 110 aa, Homo sapiens
LPVLTQPPSASGTPGQRVTISCSGSSSNIGSNYVYWYQQLPGTAPKLLTYRNDQRPSGVPDRFSGSKSGTSASLAISGLRSEDEADYFCSAWDDSLGGEVFGTGTKVNVL

SEQ ID NO: 1804 - protein, 118 aa, Homo sapiens
QVQLVQSGGGLVQPGGSLRLSCAASGFTFSSHAMSWVRQAPGKGLEWVSAISGSGGSTYYADSVKGRFTISRDNSKNTLYLQMNSLRAEDTAVYYCAKIGTADAFDIWGQGTTVTVSS

SEQ ID NO: 1805 - protein, 110 aa, Homo sapiens
QSALTQPPSVSGTPGQRVTISCSGGVPNIGSNPVNWYLHRPGTAPKLLIYNSNQWPSGVPDRFSGSRSGTSASLAISGLQSEDEADYYCAAWDDSLDGLVFGGGTKLTVL

SEQ ID NO: 1806 - protein, 124 aa, Homo sapiens
QVQLVQSGAEVKKPGASVKVSCKASGYTFTSYYMHWVRQAPGQGLEWMGIINPSGGSTSYAQKFQGRVTMTRDTSTSTVYMELSSLRSEDTAVYYCAREKSSSWYGGDNWFDPWGQGTLVTVSS

SEQ ID NO: 1807 - protein, 110 aa, Homo sapiens
QSALTQPRSVSGSPGQSVTISCTGSSSDVGGYHYVSWYQQYPGKVPKLMIYDVSRRPSGVSDRFSGSKSGSTASLTISGLQAEDEADYYCSSYTSSSTVVFGGGTKLTVL

SEQ ID NO: 1808 - protein, 130 aa, Homo sapiens
QVQLVQSGAEVKKPGASVKVSCKASGYTFTSYGISWVRQAPGQGLEWMGWISAYNGNTNYAQKLQGRVTMTTDTSTSTAYMELRSLRSDDTAVYYCARDVHPLDIAVAADDYYYYGMDVWGQGTLVTVSS

SEQ ID NO: 1809 - protein, 108 aa, Homo sapiens
SSELTQDPAVSVALGQTVRITCQGDSLTTNYASWYQQKPGQAPVLVIYGKNKRPSGIPDRFSGSISGNTASLTITGAQAEDEADYYCNSRDSSGKHYVFGTGTKVTVL

SEQ ID NO: 1810 - protein, 122 aa, Homo sapiens
EVQLVESGGGVVQPGRSLRLSCAASGFTFSSYAMSWVRQAPGKGLEWVSAISGSGGSTYYADSVKGRFTISRDNSKNTLYLQMNSLRAEDTAVYYCAKDWGLVQLESGYDYWGQGTLVTVSS

SEQ ID NO: 1811 - protein, 111 aa, Homo sapiens
QSVLTQPPSVSGAPGQRVTISCTGSSSNIGAGYDVHWYQQLPGKAPKLLIYDNTNRPSGVPDRFSGSKSGTSASLAISGLQSEDEADYYCAAWDESLNGQVFGTGTKVTVL

SEQ ID NO: 1812 - protein, 122 aa, Homo sapiens
QVQLQQSGPGLVKPSGTLSLTCAVSGGSISSSDWWSWVRQVPGKGLEWIGEIYHSGSPNYNPSLRGRVTISVDKSKNQFSLKLSSVTAADTAVYYCARERVAPTVDGAFDVWGQGTMVTVSS

SEQ ID NO: 1813 - protein, 107 aa, Homo sapiens
DIVMTQSPSSLSASVGDRVTITCRASQSITTYLNWYQQKPGKAPKLLIYAASSLQSGVPSRFSGSGSGTEFTLTISSLQPEDFATYYCQQASSFPLTFGGGTKVDLK

SEQ ID NO: 1814 - protein, 121 aa, Homo sapiens
EVQLVQSGAEVKKPGESLKISCKGSGYSFTNYWIGWVRQMPGKGLEWIGIIYPGDSDTRYSPSFQGQVTISADKSTSTAYLQWSSLKASDTAMYYCARIKSYYDSSGYYLWGQGTLVTVSS

SEQ ID NO: 1815 - protein, 107 aa, Homo sapiens
QSVLTQPPSVSVAPGQTASITCGGNNIGSKSVHWYQQKPGQAPVLVVYDDSDRPSGIPERFSGSNSGNTATLTISRVEAGDEADYYCQVWDSSSEEVFGGGTKLTVL

SEQ ID NO: 1816 - protein, 115 aa, Homo sapiens
EVQLVQSGGGLVQPGGSLRLSCAASGFTFSSYAMSWVRQAPGKGLEWVSAISGSGGSTYYADSVKGRFTISRDNSKNTLYLQMNSLRADDTAVYYCARRGFMDVWGKGTLVTVSS

SEQ ID NO: 1817 - protein, 108 aa, Homo sapiens
SSELTQDPAVSVALGQTVTITCQGDILEAYYASWYQQRPGQAPVLVIYGENNRPSGIPDRFSGSRSGNTASLTITGAQAEDEADYYCNSRDSSGSHVVFGGGTKMTVL

SEQ ID NO: 1818 - protein, 115 aa, Homo sapiens
QVQLVQSGGGLVQPGGSLRLSCAASGFTFNSFAMTWVRQAPGKGLEWVSGISGSGGSTYYADSVKGRFTISRDNSKNTLYLQMNSLRAEDTAVYYCAKGHAFDIWGQGTTVTVSS

SEQ ID NO: 1819 - protein, 112 aa, Homo sapiens
DIVMTQSPLSLSVTPGQPASISCKSSQSLLHSDGKTYLYWYLQKPGQPPQLLIYEVSNRFSGVPDRFSGSGSGTDFTLKISRVEAEDVGVYYCMQSIQLPLTFGGGTKVEIK

SEQ ID NO: 1820 - protein, 117 aa, Homo sapiens
QVQLVQSGGGLVQPGGSLRLSCAASGFTFSSYAMSWVRQAPGKGLEWVSAISGSGGSTYYADSVKGRFTISRDNSKNTLYLQMNSLRAEDTAVYYCAKDKGGGFDPWGQGTLVTVSS

SEQ ID NO: 1821 - protein, 110 aa, Homo sapiens
NFMLTQPHSVSESPGKTVTISCTRSSGSIASNYVQWYQQRPGSSPTTVIYEDNQRPSGVPDRFSGSIDSSSNSASLTISGLKTEDEADYYCQSYDSTSHVFGTGTQVTVL

SEQ ID NO: 1822 - protein, 124 aa, Homo sapiens
EVQLVQSGAEVKKPGESLKISCKGSGYSFTNYWIGWVRQMPGKGLEWVGIIYPGDSDTRYSPSFQGQVTISADKSISTAYLQWSSLKASDTAMYYCARPGYYYGSGSYYNVDYWGQGTLVTVSS

SEQ ID NO: 1823 - protein, 107 aa, Homo sapiens
QPGLTQPPSVSVSPGQTASITCSGDELGDKFAFWYQQKPGQSPVLVIYQDSKRPSGIPERFSGSISGNTATLTISRVEAGDEADYFCQVWDSNGGPPFGRGTKLTVL

SEQ ID NO: 1824 - protein, 8 aa, Homo sapiens
GFTFDDYA

SEQ ID NO: 1825 - protein, 8 aa, Homo sapiens
LSWNTGRV

SEQ ID NO: 1826 - protein, 14 aa, Homo sapiens
AKGSALGLVGWFDA

SEQ ID NO: 1827 - protein, 6 aa, Homo sapiens
SLRTYY

SEQ ID NO: 1828 - skipped

SEQ ID NO: 1829 - protein, 10 aa, Homo sapiens
NSQDSSGDLL

SEQ ID NO: 1830 - protein, 8 aa, Homo sapiens
GFTFGDYA

SEQ ID NO: 1831 - protein, 8 aa, Homo sapiens
ITRNSGRI

SEQ ID NO: 1832 - protein, 10 aa, Homo sapiens
ASEMTGAYDI

SEQ ID NO: 1833 - protein, 6 aa, Homo sapiens
GLRYYY

SEQ ID NO: 1834 - skipped

SEQ ID NO: 1835 - protein, 11 aa, Homo sapiens
NSRDSSGNHRF

SEQ ID NO: 1836 - protein, 8 aa, Homo sapiens
GFTFSSYA

SEQ ID NO: 1837 - protein, 8 aa, Homo sapiens
ISYDGSNK

SEQ ID NO: 1838 - protein, 13 aa, Homo sapiens
AKEDYYDSSGSNY

SEQ ID NO: 1839 - protein, 8 aa, Homo sapiens
SSNIGSNY

SEQ ID NO: 1840 - skipped

SEQ ID NO: 1841 - protein, 11 aa, Homo sapiens
SAWDDSLGGEV

SEQ ID NO: 1842 - protein, 8 aa, Homo sapiens
GFTFSSHA

SEQ ID NO: 1843 - protein, 8 aa, Homo sapiens
ISGSGGST

SEQ ID NO: 1844 - protein, 11 aa, Homo sapiens
AKIGTADAFDI

SEQ ID NO: 1845 - protein, 8 aa, Homo sapiens
VPNIGSNP

SEQ ID NO: 1846 - skipped

SEQ ID NO: 1847 - protein, 11 aa, Homo sapiens
AAWDDSLDGLV

SEQ ID NO: 1848 - protein, 8 aa, Homo sapiens
GYTFTSYY

SEQ ID NO: 1849 - protein, 8 aa, Homo sapiens
INPSGGST

SEQ ID NO: 1850 - protein, 17 aa, Homo sapiens
AREKSSSWYGGDNWFDP

SEQ ID NO: 1851 - protein, 9 aa, Homo sapiens
SSDVGGYHY

SEQ ID NO: 1852 - skipped

SEQ ID NO: 1853 - protein, 10 aa, Homo sapiens
SSYTSSSTVV

SEQ ID NO: 1854 - protein, 8 aa, Homo sapiens
GYTFTSYG

SEQ ID NO: 1855 - protein, 8 aa, Homo sapiens
ISAYNGNT

SEQ ID NO: 1856 - protein, 23 aa, Homo sapiens
ARDVHPLDIAVAADDYYYYGMDV

SEQ ID NO: 1857 - protein, 6 aa, Homo sapiens
SLTTNY

SEQ ID NO: 1858 - skipped

SEQ ID NO: 1859 - protein, 11 aa, Homo sapiens
NSRDSSGKHYV

SEQ ID NO: 1860 - protein, 8 aa, Homo sapiens
GFTFSSYA

SEQ ID NO: 1861 - protein, 8 aa, Homo sapiens
ISGSGGST

SEQ ID NO: 1862 - protein, 15 aa, Homo sapiens
AKDWGLVQLESGYDY

SEQ ID NO: 1863 - protein, 9 aa, Homo sapiens
SSNIGAGYD

SEQ ID NO: 1864 - skipped

SEQ ID NO: 1865 - protein, 11 aa, Homo sapiens
AAWDESLNGQV

SEQ ID NO: 1866 - protein, 9 aa, Homo sapiens
GGSISSSDW

SEQ ID NO: 1867 - protein, 7 aa, Homo sapiens
IYHSGSP

SEQ ID NO: 1868 - protein, 15 aa, Homo sapiens
ARERVAPTVDGAFDV

SEQ ID NO: 1869 - protein, 6 aa, Homo sapiens
QSITTY

SEQ ID NO: 1870 - skipped

SEQ ID NO: 1871 - protein, 9 aa, Homo sapiens
QQASSFPLT

SEQ ID NO: 1872 - protein, 8 aa, Homo sapiens
GYSFTNYW

SEQ ID NO: 1873 - protein, 8 aa, Homo sapiens
IYPGDSDT

SEQ ID NO: 1874 - protein, 14 aa, Homo sapiens
ARIKSYYDSSGYYL

SEQ ID NO: 1875 - protein, 6 aa, Homo sapiens
NIGSKS

SEQ ID NO: 1876 - skipped

SEQ ID NO: 1877 - protein, 10 aa, Homo sapiens
QVWDSSSEEV

SEQ ID NO: 1878 - protein, 8 aa, Homo sapiens
GFTFSSYA

SEQ ID NO: 1879 - protein, 8 aa, Homo sapiens
ISGSGGST

SEQ ID NO: 1880 - protein, 8 aa, Homo sapiens
ARRGFMDV

SEQ ID NO: 1881 - protein, 6 aa, Homo sapiens
ILEAYY

SEQ ID NO: 1882 - skipped

SEQ ID NO: 1883 - protein, 11 aa, Homo sapiens
NSRDSSGSHVV

SEQ ID NO: 1884 - protein, 8 aa, Homo sapiens
GFTFNSFA

SEQ ID NO: 1885 - protein, 8 aa, Homo sapiens
ISGSGGST

SEQ ID NO: 1886 - protein, 8 aa, Homo sapiens
AKGHAFDI

SEQ ID NO: 1887 - protein, 11 aa, Homo sapiens
QSLLHSDGKTY

SEQ ID NO: 1888 - skipped

SEQ ID NO: 1889 - protein, 9 aa, Homo sapiens
MQSIQLPLT

SEQ ID NO: 1890 - protein, 8 aa, Homo sapiens
GFTFSSYA

SEQ ID NO: 1891 - protein, 8 aa, Homo sapiens
ISGSGGST

SEQ ID NO: 1892 - protein, 10 aa, Homo sapiens
AKDKGGGFDP

SEQ ID NO: 1893 - protein, 8 aa, Homo sapiens
SGSIASNY

SEQ ID NO: 1894 - skipped

SEQ ID NO: 1895 - protein, 9 aa, Homo sapiens
QSYDSTSHV

SEQ ID NO: 1896 - protein, 8 aa, Homo sapiens
GYSFTNYW

SEQ ID NO: 1897 - protein, 8 aa, Homo sapiens
IYPGDSDT

SEQ ID NO: 1898 - protein, 17 aa, Homo sapiens
ARPGYYYGSGSYYNVDY

SEQ ID NO: 1899 - protein, 6 aa, Homo sapiens
ELGDKF

SEQ ID NO: 1900 - skipped

SEQ ID NO: 1901 - protein, 10 aa, Homo sapiens
QVWDSNGGPP

SEQ ID NO: 1902 - protein, 15 aa, synthetic construct
EPKSCDKTHTCPPCP

SEQ ID NO: 1903 - protein, 12 aa, synthetic construct
ERKCCVECPPCP

SEQ ID NO: 1904 - protein, 12 aa, synthetic construct
ESKYGPPCPSCP

SEQ ID NO: 1905 - protein, 13 aa, synthetic construct
APELLGGPDVFLF

SEQ ID NO: 1906 - protein, 24 aa, synthetic construct
  VARIANT 5..24: note = GGGS repeats may be deleted
GGGSGGGSGGGSGGGSGGGSGGGS

SEQ ID NO: 1907 - protein, 30 aa, synthetic construct
  VARIANT 6..30: note = GGGGS repeats may be deleted
GGGGSGGGGSGGGGSGGGGSGGGGSGGGGS

SEQ ID NO: 1908 - protein, 12 aa, synthetic construct
GSAGSAAGSGEF

SEQ ID NO: 1909 - protein, 30 aa, synthetic construct; identical to SEQ ID NO: 1907

SEQ ID NO: 1910 - protein, 55 aa, synthetic construct
GGGSGGGSGGGSGGGSEPKSCDKTHTCPPCPGGGSGGGSGGGSGGGSGGGSGGGS

SEQ ID NO: 1911 - protein, 31 aa, synthetic construct
GGGSGGGSGGGSGGGSEPKSCDKTHTCPPCP

SEQ ID NO: 1912 - protein, 4 aa, synthetic construct
GGGS

SEQ ID NO: 1913 - protein, 51 aa, synthetic construct
GGGSGGGSGGGSEPKSCDKTHTCPPCPGGGSGGGSGGGSGGGSGGGSGGGS

SEQ ID NO: 1914 - protein, 12 aa, synthetic construct
GGGSGGGSGGGS

SEQ ID NO: 1915 - protein, 37 aa, synthetic construct
APELLGGPDVFLFGGGSGGGSGGGSGGGSGGGSGGGS
